(19) United States
(12) Patent Application Publication
(10) Pub. No.: US 2025/0144213 A1
(43) Pub. Date: May 8, 2025

(54) CIRCULAR RNA AND USE THEREOF

(71) Applicant: UTC Therapeutics (Shanghai) Co., Ltd., Shanghai (CN)

(72) Inventors: Yangbing Zhao, Shanghai (CN); Gengzhen Zhu, Shanghai (CN); Changshun Wu, Shanghai (CN)

(73) Assignee: UTC Therapeutics (Shanghai) Co., Ltd., Shanghai (CN)

(21) Appl. No.: 18/730,234

(22) PCT Filed: Jan. 19, 2023
(86) PCT No.: PCT/CN2023/073206

§ 371 Date: Jul. 18, 2024

(30) Foreign Application Priority Data
Jan. 19, 2022 (WO) PCT/CN2022/072823

(51) Int. Cl. A61K 40/41; A61K 40/11; A61K 40/31; C07K 14/705; C07K 14/725; C07K 16/28; C12N 15/85

(52) U.S. Cl. CPC A61K 40/41; A61K 40/11; A61K 40/31; C07K 14/7051; C07K 14/7055; C07K 16/2878; C12N 15/85; C07K 2317/24; C07K 2317/622; C07K 2319/03; C12N 2800/107; C12N 2830/50; C12N 2840/203

(57) ABSTRACT

Provided relates to a circular RNA comprising an internal ribosome entry site (IRES) element, a protein coding sequence and a poly A. Provided also relates to the precursor RNA, the vector and the method for producing the circular, and the use of the circular RNA.

### CROSS REFERENCE TO RELATED APPLICATIONS

[0001] This is the U.S. National Stage of International Application No. PCT/CN2023/073206, filed Jan. 19, 2023, which was published in English under PCT Article 21(2), and claims priority to PCT patent application PCT/CN2022/072823, filed on Jan. 19, 2022 and entitled “Circular RNA and Use Thereof.” Both of the aforementioned PCT applications are incorporated herein by reference in their entireties.

### INCORPORATION OF SEQUENCE LISTING

[0002] The Sequence Listing is submitted as an XML file named “Sequence Listing_112298-01.xml,” created on Jul. 18, 2024, (˜1,500,924 bytes), which is incorporated herein by reference.

### FIELD

[0003] The present invention relates to the field of molecular biology and biological engineering technology, in particular, to a circular RNA.

### BACKGROUND

[0004] Messenger RNA (mRNA) has broad potential for application in biological systems. However, one fundamental limitation to its use is its relatively short half-life in biological systems. Recently, circular RNA (circRNA) is found to be superior in the duration of protein expression than conventional linear mRNA. CircRNAs lack the free ends necessary for exonuclease-mediated degradation, rendering them resistant to several mechanisms of RNA turnover and granting them extended lifespans as compared to their linear mRNA counterparts. Recently, the permuted group 1 catalytic intron-based system has been used to circularize a wide range of RNA sequences in vitro, with circularization efficiencies reported to reach nearly 100%.

### SUMMARY

[0005] One aspect of the present invention provides a circular RNA comprising, in the following order, an internal ribosome entry site (IRES) element, a protein coding sequence and a poly A.

[0006] In some embodiments, the protein is for therapeutic use.

[0007] In some embodiments, the protein is an antigen, an antibody, a chimeric antigen receptor (CAR) or a T cell receptor (TCR); preferably, the antibody is a scFv.

[0008] In some embodiments, the binding domain of the CAR is an anti-mesothelin scFv.

[0009] In some embodiments, the protein comprises an antibody or a CAR comprising the antibody as a binding domain, wherein the antibody specifically binds to mesothelin, CD123, BCMA, HER2, IL13Ra2, B7H3 or CD40, such as those antibodies and CARs provided and described in the present invention.

[0010] In some embodiments, the protein comprises a LACOSTIM as described in the present invention, or comprises a first protein and a second protein, wherein the first protein comprises an antibody, a chimeric antigen receptor (CAR) or a T cell receptor (TCR) as described in the present invention and the second protein comprises a LACOSTIM as described in the present invention.

[0011] In some embodiments, the LACOSTIM comprises a first domain that activates an antigen-presenting cell (APC) and a second domain that activates an immune effector cell, wherein (i) the first domain comprises (a) a ligand that binds to an activation receptor of the APC, or a receptor-binding fragment thereof, or (b) an antibody that binds to an activation receptor of the APC, or an antigen-binding fragment thereof; and (ii) the second domain comprises (a) a co-stimulatory receptor of the immune effector cell, or a functional fragment thereof, (b) a co-stimulatory ligand of the immune effector cell, or a receptor-binding fragment thereof, or (c) an antibody that binds to a co-stimulatory receptor of the immune effector cell, or an antigen-binding fragment thereof.

[0012] In some embodiments, the first domain is linked to the N-terminus or C-terminus of the second domain. In some embodiments, the first domain and the second domain are linked via a linker.

[0013] In some embodiments, the polyA is at least 45 nucleotides in length.

[0014] In some embodiments, the polyA is at least 70 nucleotides in length.

[0015] Another aspect of the present invention provides a precursor RNA for producing any one of above circular RNA, any one of above precursor RNA comprising a circularizing element, an internal ribosome entry site (IRES) element, a protein coding sequence and a poly A.

[0016] In some embodiments, the circularizing element comprises a first intron sequence on the 5′ of the internal ribosome entry site (IRES) element and a second intron sequence on the 3′ of the poly A.

[0017] In some embodiments, the first intron sequence and the second intron sequence are derived from Group I or Group II intron self-splicing sequences.

[0018] In some embodiments, the first intron element comprises a 3′ Group I intron fragment containing a 3′ splice site dinucleotide, and the second intron element comprises a 5′ Group I intron fragment containing a 5′ splice site dinucleotide.

[0019] In some embodiments, the precursor RNA further comprises a 5′ spacer sequence between the first intron element and the internal ribosome entry site (IRES) element, and a 3′ spacer sequence between the polyA and the second intron element.

[0020] In some embodiments, the precursor RNA further comprises a 5′ homology arm external to the first intron element and a 3′ homology arm external to the second intron element.

[0021] Another aspect of the present invention provides a vector for producing any one of above precursor RNA, wherein the vector comprises a DNA template for the precursor RNA.

[0022] In some embodiments, the vector further comprises an RNA polymerase promoter.

[0023] Another aspect of the present invention provides a method of producing a circular RNA, the method comprising circularizing any one of above precursor RNA to produce the circular RNA.

[0024] In some embodiments, the method comprises transcribing a vector comprising DNA template for any one of above precursor RNA to obtain the precursor RNA before the circularization.

[0025] In some embodiments, the transcription step is performed in a cell or in a cell-free system.

[0026] In some embodiments, the method further comprises purifying the circular RNA.

[0027] In some embodiments, the circular RNA is purified through oligo dT-based capturing.

[0028] Another aspect of the present invention provides a cell or a cell population comprising any one of above circular RNA.

[0029] In some embodiments, the cell or a cell population comprising a first circular RNA and a second circular RNA, wherein the protein coding sequence of the first circular RNA encodes an antibody, a chimeric antigen receptor (CAR) or a T cell receptor (TCR) as described in the present invention and the protein coding sequence of the second circular RNA encodes a LACOSTIM as described in the present invention. Another aspect of the present invention provides a method for expressing a protein in a cell, the method comprising introducing any one of above circular RNA, any one of above precursor RNA or any one of above vector into a host cell and expressing the protein encoded by the protein coding sequence in the circular RNA.

[0030] Another aspect of the present invention provides a method of producing a protein, the method comprising:
[0031] (a) translating any one of above circular RNA to produce the protein encoded by the protein coding sequence of the circular RNA; and
[0032] (b) purifying the protein.

[0033] In some embodiments, the translation step is performed in a cell or in a cell-free system.

[0034] In some embodiments, the step (a) comprises introducing any one of above circular RNA, any one of above precursor RNA or any one of above vector into a host cell and translating the circular RNA in the host cell to produce the protein.

[0035] Another aspect of the present invention provides a pharmaceutically composition comprising:
[0036] (a) any one of above circular RNA, any one of above precursor RNA, any one of above vector, or any one of above cell or cell population; and
[0037] (b) a pharmaceutically acceptable carrier.

[0038] Another aspect of the present invention provides a composition comprising:
[0039] (a) any one of above circular RNA, any one of above precursor RNA, any one of above vector; and
[0040] (b) a delivery carrier.

[0041] Another aspect of the present invention provides a method of purifying any one of above circular RNA, the method comprising purifying the circular RNA through oligo dT-based capturing.

[0042] Another aspect of the present invention provides a method of treating a disease in a subject in need thereof, comprising administering to the subject a therapeutically effective amount of any one of above circular RNA, any one of above precursor RNA, any one of above vector or any one of above cell or cell population.

[0043] In some embodiments, the disease is a tumor, a cancer, a virus infection or an autoimmune disease.

[0044] In some embodiments, the cancer expresses mesothelin, CD123, BCMA, HER2, IL13Ra2 or B7H3.

[0045] In some embodiments, the cancer is a solid tumor or a hematological cancer.

[0046] In some embodiments, the cancer is acute myeloid leukemia (AML), B-acute lymphoid leukemia (B-ALL), T-acute lymphoid leukemia (T-ALL), B cell precursor acute lymphoblastic leukemia (BCP-ALL) or blastic plasmacytoid dendritic cell neoplasm (BPDCN), non-Hodgkin's lymphoma, chronic lymphocytic leukemia, acute lymphocytic leukemia, human B-cell precursor leukemia, multiple myeloma or malignant lymphoma.

[0047] In some embodiments, the cancer is mesothelioma, pancreatic cancer, ovarian cancer, lung cancer, breast cancer, stomach cancer, cervical cancer, uroepithelial cancer, esophageal cancer, bladder cancer, colorectal cancer, endometrial cancer, kidney cancer, head and neck cancer, sarcoma, glioblastoma, prostate cancer, thyroid cancer or glioma.

[0048] Another aspect of the present invention provides use of any one of above circular RNA, any one of above precursor RNA, any one of above vector or any one of above cell or cell population in preparation of a medicament for treating a disease in a subject in need thereof.

[0049] In some embodiments, the disease is a tumor, a cancer, a virus infection or an autoimmune disease.

[0050] In some embodiments, the cancer expresses mesothelin, CD123, BCMA, HER2, IL13Ra2 or B7H3.

[0051] In some embodiments, the cancer is a solid tumor or a hematological cancer.

[0052] In some embodiments, the cancer is acute myeloid leukemia (AML), B-acute lymphoid leukemia (B-ALL), T-acute lymphoid leukemia (T-ALL), B cell precursor acute lymphoblastic leukemia (BCP-ALL) or blastic plasmacytoid dendritic cell neoplasm (BPDCN), non-Hodgkin's lymphoma, chronic lymphocytic leukemia, acute lymphocytic leukemia, human B-cell precursor leukemia, multiple myeloma or malignant lymphoma.

[0053] In some embodiments, the cancer is mesothelioma, pancreatic cancer, ovarian cancer, lung cancer, breast cancer, stomach cancer, cervical cancer, uroepithelial cancer, esophageal cancer, bladder cancer, colorectal cancer, endometrial cancer, kidney cancer, head and neck cancer, sarcoma, glioblastoma, prostate cancer, thyroid cancer or glioma.

In the present invention, we introduce poly A sequences into the circRNA molecule. The circRNA with poly A sequence can be effectively and feasibly purified by oligo dT resin with high purity. The circRNA with poly A sequence is also found to be superior in improving protein expression level and biological function, compared with circRNA counterpart without poly A sequence.

### BRIEF DESCRIPTION OF THE DRAWINGS

[0054] FIG. 1 shows schematic representation of DNA template for M12.BBZ linear mRNA (derived from IVT of pDA-M12.BBZ CAR plasmid), M12.BBZ circRNA (derived from IVT of pCA-M12.BBZ CAR plasmid), M12.BBZ-45A circRNA (derived from IVT of pCA45-M12.BBZ CAR plasmid) and M12.BBZ-70A circRNA (derived from IVT of pCA70-M12.BBZ CAR plasmid).

[0055] FIG. 2 is process graph showing the purification process of M12.BBZ-45A circRNA by CIMmultus Oligo dT column (s3 represents the flowthrough sample, s4 represents the column wash sample, s5 represents the circRNA elution sample).

[0056] FIG. 3 is agarose gel picture showing the bands of different sample collected during the purification process of M12.BBZ-45A circRNA by CIMmultus Oligo dT column; wherein s3 represents the flowthrough sample, s4 represents the column wash sample, s5 represents the M12.BBZ-45A circRNA elution sample.

[0057] FIG. 4 is process graph showing the purification process of M12.BBZ-70A circRNA by CIMmultus Oligo dT column (s3 represents the flowthrough sample, s4 represents the circRNA elution sample).

[0058] FIG. 5 is agarose gel picture showing the bands of different sample collected during the purification process of M12.BBZ-70A circRNA by CIMmultus Oligo dT column, s3 represents the flowthrough sample, s4 represents the M12.BBZ-70A circRNA elution sample.

[0059] FIG. 6 is statistical analysis of the final yield of circRNA purified by oligo dT column.

[0060] FIG. 7 shows 24 hours after T cell electroporation, FACS staining and Mean Fluorescence Index (MFI) analysis of Mesothelin-Fc recombinant protein of T cells electroporated with M12.BBZ CAR linear mRNA, M12.BBZ CAR circRNA, M12.BBZ CAR circRNA with 70A. These results show that introducing the poly A sequence into the circRNA can improve the protein expression level of M12.BBZ.

[0061] FIG. 8 shows 48 hours after T cell electroporation, FACS staining and Mean Fluorescence Index (MFI) analysis of Mesothelin-Fc recombinant protein of T cells electroporated with M12.BBZ CAR linear mRNA, M12.BBZ CAR circRNA, M12.BBZ CAR circRNA with 70A. These results show that introducing the poly A sequence into the circRNA can improve the protein expression level of M12.BBZ.

[0062] FIG. 9 shows the killing curves of CAR-T cells that electroporated with M12.BBZ CAR linear mRNA, M12.BBZ CAR circRNA, M12.BBZ CAR circRNA with 70A to A549 cells electroporated with 5 ug MSLN mRNA at E/T ratio=3:1. These results show that the killing effect of M12.BBZ circRNA with 70A is better than the M12.BBZ circRNA without poly A.

[0063] FIG. 10 shows schematic representation of pDA anti-meso CAR-M12 plasmid (i.e., pDA-M12.BBZ CAR plasmid).

[0064] FIG. 11 shows schematic representation of pCA-M12.BBZ CAR plasmid.

[0065] FIG. 12 shows schematic representation of pCA45-M12.BBZ CAR plasmid.

[0066] FIG. 13 shows schematic representation of pCA70-M12.BBZ CAR plasmid.

[0067] FIGS. 14A-14B shows the killing curves of CAR-T cells that electroporated with BCMA or FMC63.BBZ CAR linear mRNA, circRNA, circRNA with 70A.

[0068] FIGS. 15A-15C shows the killing curves of CAR-T cells that electroporated with M12, BCMA or FMC63.BBZ CAR linear mRNA, circRNA, circRNA with 70A, with or without LACOSTIM expressed.

[0069] FIGS. 16A-16C provides the reads of two 96-well plates of anti-human mesothelin (or BCMA and CD123)-Fc monoclonal phage ELISA.

[0070] FIGS. 17A-17B provides flow cytometry data of anti-BCMA CAR-T cells stained with CD19-Fc (FIG. 17A) or BCMA-Fc (FIG. 17B).

[0071] FIG. 18 provides the exemplary schematic representation of pDA-CAR vector used for CAR mRNA generation.

[0072] FIG. 19 provides FACS staining results showing the binding of anti-mesothelin scFv that expressed in CART cells to mesothelin-Fc protein.

[0073] FIG. 20A provides FACS staining of the A549 cells that were electroporated with different amount of mesothelin mRNA by anti-mesothelin antibody.

[0074] FIG. 20B provides flow cytometry of the A549 cells that were electroporated with different amount of mesothelin mRNA by anti-mesothelin antibody.

[0075] FIG. 21 provides the killing curves of different mRNA-based mesothelin CART cells against A549-GFP tumor cells at E/T ratio=10:1.

[0076] FIG. 22 provides the killing curves of different mRNA-based mesothelin CART cells against A549-GFP tumor cells that were electroporated with 10 μg mesothelin mRNA at E/T ratio=10:1.

[0077] FIG. 23A provides the killing curves of different mRNA-based mesothelin CART cells against A549-GFP tumor cells that were electroporated with 2 μg mesothelin mRNA at E/T ratio=10:1.

[0078] FIG. 23B provides the 2^{nd} screening killing curves of different mRNA-based mesothelin CART cells against A549-GFP tumor cells that were electroporated with 0 μg, 2 μg or 10 μg mesothelin mRNA at E/T ratio=10:1 or 3:1.

[0079] FIG. 23C provides the killing curves of different mRNA-based mesothelin CART cells against A549-GFP tumor cells that were electroporated with 0 μg, 2 μg or 10 μg mesothelin mRNA at E/T ratio=10:1.

[0080] FIG. 24 provides FACS staining of OVCAR3, H226, ASPC1, A549 and HCC70 with isotype control and anti-mesothelin mAb.

[0081] FIG. 25A provides the frequencies of CAR+ cells of the T cells transduced with the designated BCMA CARs.

[0082] FIG. 25B provides the Medium Fluorescence Intensity (“MFI”) of CAR expression in T cells transduced with the designated BCMA CARs.

[0083] FIG. 26 provides the frequencies of CAR+CD8 cells of the T cells transduced with the designated BCMA CARs.

[0084] FIG. 27 provides the phenotype of designated CART cells characterized by CCR7 expression and CD45RO expression.

[0085] FIG. 28 provides FACS staining results showing the binding of anti-CD123 scFv that expressed in CART cells to CD123-Fc protein.

[0086] FIG. 29 provides FACS staining of the A549 cells that were electroporated with different amount of CD123 mRNA with isotype and anti-CD123 antibodies.

[0087] FIG. 30 provides the killing curves of different mRNA-based CD123 CART cells against A549-GFP tumor cells at E/T ratio=10:1.

[0088] FIG. 31 provides the killing curves of different mRNA-based anti-CD123 CART cells against A549-GFP tumor cells at E/T ratio=3:1.

[0089] FIG. 32 provides the killing curves of different mRNA-based anti-CD123 CART cells against A549-GFP tumor cells that were electroporated with 10 μg CD123 mRNA at E/T ratio=10:1.

[0090] FIG. 33 provides the killing curves of different mRNA-based anti-CD123 CART cells against A549-GFP tumor cells that were electroporated with 10 μg CD123 mRNA at E/T ratio=3:1.

[0091] FIGS. 34A-34C provide diagram of lentiviral vectors constructed (A) and the CAR expression of T cells transduced with the vectors (B). Cytokines production of T cells co-cultured with MSLN CAR and a LACOSTIM (C). Lentiviral vector transduced T cells as indicated were co-cultured with PC3, PC3 transferred with 0.5 ug MSLN RNA (PC3+Meso 0.5 ug) or PC3 transferred with 10 ug MSLN (PC3+Meso 10 ug) (Upper panel), or MSLN positive tumor OVCAR3, H226, or MSLN negative tumor A549 (Lower panel) for 24 h. Supernatant was harvested for cytokine IFNg or IL-2 detection by ELISA.

[0092] FIG. 35 provides CD107a staining of different mRNA-based anti-mesothelin CAR-T cells, including mock T cells (NO EP), T cells with LACO (A40C28), anti-mesothelin M12+/−A40C28 CAR-T cells and M32+/−A40C28 CAR-T cells, in the coculture and killing assay with OVCAR3, H226, ASPC1, A549 and HCC70 tumor cell lines.

[0093] FIG. 36 provides the killing curves of different mRNA-based anti-mesothelin CAR-T cells, including mock T cells (NO EP), T cells with A40C28, anti-mesothelin M12+/−A40C28 CAR-T cells and M32+/−A40C28 CAR-T cells, to A549-GFP tumor cells that were electroporated with 0, 0.5 μg or 10 μg mesothelin mRNA at E/T ratio=3:1.

[0094] FIG. 37 provides the killing curves of lentivirus-based anti-mesothelin CAR-T cells, including mock T cells (UTD) and anti-mesothelin M12+/−A40C28 CAR-T cells, to H226, OVCAR3 and MOLM14 cells that were electroporated with 0 or 10 μg mesothelin mRNA at E/T ratio=2:1.

[0095] FIG. 38 provides the killing curves of different mRNA-based anti-mesothelin CAR-T cells, including mock T cells (NO EP), anti-mesothelin M12+/−1412-4D11 CAR-T cells and M32+/−1412-4D11 CAR-T cells, to A549-GFP tumor cells that were electroporated with 0 or 2 μg mesothelin mRNA at E/T ratio=10:1.

[0096] FIG. 39 provides the lytic activity of lentiviral transduced T cells as indicated against MLSN negative tumor PC3, MOLM14.

[0097] FIG. 40 provides FACS staining of OVCAR3, H226, ASPC1, A549, HCC70, 786-0 and Jeko1 cells with isotype control, anti-mesothelin mAb and anti-CD40 mAb.

[0098] FIG. 41 provides CD107a staining of different mRNA-based anti-mesothelin CAR-T cells, including mock T cells (NO EP), T cells with A40C28 alone, T cells with 1412-4D11 alone, anti-mesothelin M12+/−A40C28 or 1412-4D11 CAR-T cells and M32+/−A40C28 or 1412-4D11 CAR-T cells, in the coculture and killing assay with OVCAR3, H226, ASPC1, A549, HCC70, 786-0 and Jeko1 tumor cell lines.

[0099] FIG. 42 provides the killing curves of different mRNA-based anti-mesothelin CAR-T cells, including mock T cells (NO EP), anti-mesothelin M12+/−A40C28 or 1412-4D11 CAR-T cells and M32+/−A40C28 or 1412-4D11 CAR-T cells, to OVCAR3-GFP, H226-GFP and ASPC1 tumor cells at E/T ratio=3:1.

[0100] FIG. 43 provides ELISA results of CART killing assay measuring the IFN-γ and IL2 release. Different mRNA-based anti-mesothelin CAR-T cells, including mock T cells (NO EP), anti-mesothelin M12+/−A40C28 or 1412-4D11 CAR-T cells and M32+/−A40C28 or 1412-4D11 CAR-T cells, were cocultured with OVCAR3-GFP, H226-GFP and ASPC1 tumor cells at E/T ratio=1:1.

[0101] FIGS. 44A-44B provide the MSLN and CD40 expression of different tumor cell lines (A). CD137 expression of lentiviral transduced T cells as indicated stimulated with a panel of tumor cell line expressing MLSN at different levels (B).

[0102] FIGS. 45A-45D provide the anti-tumor efficacy of A40C28-M12 LVV CART in H226 xenograft NOG tumor mode. The timeline of CART treatment in H226 xenograft NSG tumor model (A). UTD, M12, CAR or LACOSTIM expression of lentiviral transduced T cells by measuring the level of surface CAR (stained with MSLN-Fc) and LACOSTIM (stained with CD40-Fc) expression using flow cytometry analysis (B). NSG mice were implanted with 5E6 of H226-CBG cells and 11 days later treated with 1E6 or 5E6 of CAR positive T cells (M12, A40C28-M12) or non-transduced T cells (UTD) or T cell transduced only A40C28 (A40C28) as controls. Tumor size (C) and Bioluminescence (BLI) (D) were measured at multiple time points post-infusion as indicated.

[0103] FIGS. 46A-46C provide the TIL analysis in A40C28-M12 treated H226-xenograft model. TILs were separated by enzymatic digestion with 1 mg/ml Collagenase and 30 U/ml DNase I in RPIM 1640 at 37° C. with rotation for 1.5 hours (A). Schematic representation of multiplexed immunohistochemical (mIHC) (B). Distribution of CD4+ T cell, CD8+ T cell, Granzyme B+ T cell and MSLN+ target cells in tumor tissue were detected by multiplexed immunohistochemical (mIHC) (C).

[0104] FIGS. 47A-47B provide the expression of BCMA in tumor lines. FIG. 47A provides the FACS results. FIG. 47B provides the relative expression levels as compared to A549 cells.

[0105] FIGS. 48A-48B provide ELISA results showing the production of INF-γ and IL-2 by designated CART cells FIG. 48A shows INF-γ production. FIG. 48B shows IL-2 production.

[0106] FIGS. 49A-49D provide results of the tumor killing assay showing the cytolytic activities of designated CART cells against Jeko-1 cells at different E (T cells):T (tumor cells) ratio. FIG. 49A: E:T=0.1:1; FIG. 49B: E:T=0.5:1; FIG. 49C: E:T=2:1; FIG. 49D: E:T=2:1 (enlarged view).

[0107] FIGS. 50A-50E provide results of the tumor killing assay showing the cytolytic activities of designated CART cells against RPMI-8226 cells. FIG. 50A: E:T=0.1:1; FIG. 50B: E:T=0.5:1;

[0108] FIG. 50C: E:T=0.5:1 (enlarged view); FIG. 50D: E:T=2:1; FIG. 50D: E:T=2:1 (enlarged view).

[0109] FIGS. 51A-51B provide the FACS results showing the expression levels of CAR and LACO in the T cells (FIG. 51A) and the MFI of CAR (FIG. 51B).

[0110] FIGS. 52A-52B provide results showing the numbers (FIG. 52A) and the sizes of designated CART cells (FIG. 52B) during culture.

[0111] FIGS. 53A-53B provide ELISA results showing cytokine production by T cells after coculture with a panel of tumor cells. FIG. 53A shows IL-2 production. FIG. 53B shows INF-γ production.

[0112] FIGS. 54A-54C provides results of in vivo animal experiment comparing the killing effects of BCMA31, LACO-BCMA31, BCMA31-LACO, and B38M CART cells against Jeko-1 tumor cells. FIG. 54A shows the bioluminescence imaging of Jeko-1 tumors. FIG. 54B shows the average Radiance of bioluminescence. FIG. 54C shows the survival of the mice.

[0113] FIG. 55 provides FACS results showing the expression levels of CAR and LACO in the T cells after mRNA electroporation.

[0114] FIG. 56 provides the expression of CD107a in designated CART cells after coculture with different tumor cells.

[0115] FIGS. 57A-57D provide results of Incucyte Live-Cell Analysis of the cytotoxic T cell activities of designated CART cells against different tumor cells. FIG. 57A: Nalm6 cells;

[0116] FIG. 57B: Jeko-1 cells; FIG. 57C: RPMI-8226 cells; FIG. 57D: Raji cells.

[0117] FIG. 58 shows FACS staining of A549, SK-OV3, Jeko-1, Molm-14, SupT-1, 293T, Nalm-6 and PC-3 cells with PE-isotype control and PE-anti-CD123 mAb.

[0118] FIG. 59 shows CD107a staining of anti-CD123-C5, anti-CD123-C7, anti-CD123-C11 CART cells in the coculture and killing assay with different tumor cell lines.

[0119] FIG. 60 provides the killing curves of different mRNA-based anti-CD123 CART cells with or without LACO (A40C.CD28) against MOLM-14, NALM6 or JEKO-1 tumor cells at E/T ratio=10:1

[0120] FIG. 61 provides the killing curves of different mRNA-based anti-CD123 CART cells with or without LACO (A40C.CD28) against A549 tumor cells that were electroporated with 10 μg, 0.1 μg or 0 CD123 mRNA at E/T ratio=30:1.

[0121] FIG. 62 provides ELISA results showing the IFN-gamma secretion of the T cells electroporated with different CD123 CAR with or without LACO.

[0122] FIG. 63 provides results of five representative 96-well plate of anti-human CD40-Fc monoclonal phage ELISA. Colony 18 #, 37 #, 38 #, 45 #, 47 # and 52 # produced the scFv(s) designated as 40-18, 40-37, 40-38, 40-45, 40-47, and 40-52, which were selected for further studies.

[0123] FIG. 64 provides FACS staining results showing the binding of the anti-CD40 scFv(s) expressed in CAR-T cells to CD40-Fc protein.

[0124] FIG. 65 provides the killing curves of different mRNA-based CD40 scFv+anti-Her2 CART cells against A549-GFP tumor cells at different E/T ratio.

[0125] FIGS. 66A-66C provide CD107a staining of CART cells in the coculture and killing assay with A549 cells (FIG. 66A), PC-3 (FIG. 66B) and SK-OV3 (FIG. 66C).

### DETAILED DESCRIPTION

[0126] It should be understood that this invention is not limited to particular embodiments described herein. It is also to be understood that the terminology used herein is for the purpose of describing particular embodiments only, and is not intended to be limiting, since the scope of the present invention will be limited only by the appended claims.

[0127] Unless defined otherwise, all technical and scientific terms used herein have the same meaning as commonly understood by one of ordinary skill in the art to which this invention belongs. Although any methods and materials similar or equivalent to those described herein can also be used in the practice or testing of the present invention, the preferred methods and materials are now described. All publications mentioned herein are to disclose and describe the methods and/or materials in connection with which the publications are cited.

[0128] Where a range of values with one or two limits is provided, it is understood that a smaller range between any stated intervening value in that stated range and either limit of that stated range is encompassed within the invention. Where the stated range includes one or two limits, ranges excluding either or both of the limits are also included in the invention.

### Terminology

[0129] It must be noted that as used herein and in the appended claims, the singular forms “a,” “an,” and “the” include plural referents unless the context clearly dictates otherwise.

[0130] It is further noted that the claims may be drafted to exclude any optional element. As such, this statement is intended to serve as antecedent basis for use of such exclusive terminology as “solely,” “only” and the like in connection with the recitation of claim elements, or use of a “negative” limitation.

[0131] Unless otherwise stated, the term “comprise”, “include”, “contain” and variations of these terms, such as comprising, comprises and comprised, are not intended to exclude further members, components, integers or steps. These terms also encompass the meaning of “consist of” or “consisting of”. The term “consist of” or “consisting of” is a particular embodiment of the term “comprise”, wherein any other non-stated member, component, integer or step is excluded.

[0132] The term “about” refers to a range equal to the particular value plus or minus ten percent (+/−10%).

[0133] The term “and/or” refers to any one, several or all of the elements connected by the term.

[0134] The terms “circRNA”, “circular RNA” or “cRNA”, as used herein, refers to a RNA molecule that forms a circular structure through covalent bonds.

[0135] The term “internal ribosome entry site (IRES)”, as used herein refers to an RNA sequence capable of initiating translation of a polypeptide in the absence of a typical RNA cap structure.

[0136] The term “vector”, as used herein, refers to a piece of DNA, that is synthesized (e.g., using PCR), or that is taken from a virus, plasmid, or cell of a higher organism into which a foreign DNA fragment can be or has been inserted for cloning and/or expression purposes. A vector can be used for inducing a nucleic acid into a cell. A vector can be stably maintained in a cell or an organism. A vector may comprise, for example, an origin of replication, a selectable marker or reporter gene, such as antibiotic resistance or fluorescent protein gene, and/or a multiple cloning site (MCS). The term “vector” includes linear vector or a circular vector, such as linear DNA fragments (e.g., PCR products, linearized plasmid fragments), plasmid vectors, viral vectors, cosmids, bacterial artificial chromosomes (BACs), yeast artificial chromosomes (YACs), and the like.

[0137] The term “element”, as used herein, refers to a separate or distinct part of something, for example, a nucleic acid sequence with a separate function within a longer nucleic acid sequence.

[0138] The term “operably linked”, as used herein, refers to the association of nucleic acid sequences on a single nucleic acid fragment so that the function of one is affected by the other.

[0139] For example, a promoter is operably linked with a coding sequence when it is capable of affecting the expression of that coding sequence (i.e., that the coding sequence is under the transcriptional control of the promoter). In the present invention, the term “operably linked” means that the elements of a vector are positioned such that they can be transcribed to form a precursor RNA, the elements of a precursor RNA are positioned such that they can then be circularized into a circular RNA and/or the elements of a circular RNA are positioned such that they can be translated to produce a protein.

[0140] The term “adjacent” and its grammatical equivalents as used herein refers to right next to the object of reference. For example, the term “adjacent” in the context of a nucleotide sequence can mean without any nucleotides in between, i.e., the absence of intervening sequences between two nucleotide sequences.

[0141] The term “sequence identity”, as used herein, refers to the percentage of identical nucleotide or amino acid residues at corresponding positions in two or more sequences when the sequences are aligned to maximize sequence matching, i.e., taking into account gaps and insertions. The alignment of the sequences and the calculation of percentage of the sequence identity can be carried out with suitable computer programs known in the art. Such programs include, but are not limited to, BLAST, ALIGN, ClustalW, EMBOSS Needle, etc. An example of a local alignment program is BLAST (Basic Local Alignment Search Tool), which is available from the webpage of National Center for Biotechnology Information which can currently be found at http://www.ncbi.nlm.nih.gov// and which was firstly described in Altschul et al. (1990) J. Mol. Biol. 215; 403-410. Examples of a global alignment program (which optimizes the alignment over the full-length of the sequences) are EMBOSS Needle and EMBOSS Stretcher programs based on the Needleman-Wunsch algorithm (Needleman, Saul B.; and Wunsch, Christian D. (1970), “A general method applicable to the search for similarities in the amino acid sequence of two proteins”, Journal of Molecular Biology 48 (3): 443-53), which are both available at http://www.ebi.ac.uk/Tools/psa/.

[0142] The term “antibody”, as used herein, refers to an immunoglobulin, antigen-binding fragment, or derivative thereof, that specifically binds to and recognizes an antigen, an antigenic fragment thereof, or a dimer or multimer of the antigen. The term “antibody” is used herein in the broadest sense and encompasses various antibody structures, including but not limited to monoclonal antibodies, polyclonal antibodies, multispecific antibodies (e.g., bispecific antibodies), and antibody fragments, so long as they exhibit the desired antigen-binding activity. Non-limiting examples of antibodies include, for example, intact immunoglobulins and variants and fragments thereof that retain binding affinity for the antigen. Examples of antibody fragments include but are not limited to Fv, Fab, Fab′, Fab′-SH, F(ab′)₂; diabodies; linear antibodies; single-chain antibody molecules (e.g., scFv); single domain antibody (VHH); and multispecific antibodies formed from antibody fragments. Antibody fragments include antigen binding fragments either produced by the modification of whole antibodies or those synthesized de novo using recombinant DNA methodologies (see, e.g., Kontermann and Dubel (Ed), Antibody Engineering, Vols. 1-2, 2^{nd} Ed., Springer Press, 2010).

[0143] A classical full-length antibody molecule is an immunoglobulin molecule (e.g., IgG) or its multimers (e.g. IgA or IgM) composed of four polypeptide chains. The four polypeptide chains include two identical heavy chains (H) and two identical light chains (L), which are linker by a disulfide bond to form a tetramer. Each heavy chain consists of a heavy chain variable region (“HCVR” or “VH”) and a heavy chain constant region (CH, including the structural domains CH1, CH2 and CH3). Each light chain consists of a light chain variable region (“LCVR” or “VL”) and a light chain constant region (CL). The heavy chain and the constant region of the light chain (CH and CL) are not directly involved in antibody-antigen binding, but exhibit a variety of effector functions, such as mediating antibody binding to tissues or factors of the host, including various cells of the immune system (e.g., effector cells) and the first component of the classical complement system (C1q). The variable regions of the heavy and light chains (VH and VL) form the antigen-binding site. VH and VL each have highly variable regions known as complementarity determining regions (CDR) with a high degree of variability in amino acid composition and sequence arrangement, which are critical sites for antibody-antigen binding, interspersed with more conserved sequences known as framework regions (FR). Each VH and VL consists of three CDRs and four FRs arranged in the following order from the amino terminus to the hydroxyl terminus: FR1, CDR1, FR2, CDR2, FR3, CDR3, FR4. In this paper, the three heavy chain complementary determining regions may also be called HCDR1, HCDR2 and HCDR3, respectively. The four heavy chain framework regions are called HFR1, HFR2, HFR3 and HFR4, respectively; the three light chain complementary decision regions may also be called LCDR1, LCDR2 and LCDR3, respectively, and the four light chain framework regions are called LFR1, LFR2, LFR3, and LFR4, respectively. The variable regions of the heavy and light chains (VH and VL) form the antigen binding site, respectively.

[0144] As used herein, the term “complementary determining region” or “CDR” refers to the amino acid residues responsible for antigen binding in the variable region of the antibody. The precise boundaries of the CDR can be defined according to various numbering systems known in the art, for example, according to the Kabat numbering system (Kabat et al., Sequences of Proteins of Immunological Interest, 5th Ed. Public Health Service, National Institutes of Health, Bethesda, Md., 1991), the Chothia numbering system (Chothia & Lesk (1987) J. Mol. Biol. 196:901-917; Chothia et al: 878-883) or as defined in the IMGT numbering system (Lefranc et al., Dev. Comparat. Immunol. 27:55-77, 2003). For a given antibody, a person skilled in the art will readily identify the CDR as defined according to the respective numbering system, and the correspondence between the different numbering systems is well known to a person skilled in the art (see, for example, Lefranc et al., Dev. Comparat. Immunol. 27:55-77, 2003). The antibodies of the present invention may utilize any of these numbering systems to define the CDR, although it is preferred that the Kabat numbering system be used to define the CDR.

[0145] The term “chimeric antigen receptor” or “CAR” refers to a fusion protein comprising an extracellular domain capable of binding to an antigen (i.e., binding domain), a transmembrane domain and an intracellular domain comprising one or more intracellular signaling domains derived from signal transducing proteins. These intracellular signaling domains are typically different from the polypeptide from which the extracellular domain is derived. The extracellular domain can be any proteinaceous molecule or part thereof that can specifically bind to a predetermined antigen. In some embodiments, the extracellular domain comprises an antibody or antigen binding fragment thereof. In some embodiments, the intracellular signaling domain can be any oligopeptide or polypeptide domain known to function to transmit a signal causing activation or inhibition of a biological process in a cell, for example, activation of an immune cell such as a T cell or a NK cell. Intracellular signaling domains typically include immunoreceptor tyrosine activation motifs (ITAM), such as signaling domains derived from CD3ζ molecules, responsible for activating immune effector cells and producing killing effects. Alternatively, chimeric antigen receptors may also include a signaling peptide at the amino terminus responsible for intracellular localization of the nascent protein, as well as a hinge region between the extracellular domain and the transmembrane domain. The intracellular signaling domain may also include a co-stimulatory structural domain derived from, for example, 4-1BB or CD28 molecules.

[0146] The term “purify”, “purifying” or “purification”, as used herein, generally refers to isolation of the substance of interest (for example, a compound, a polynucleotide, a protein or a polypeptide) such that the substance constitutes the main component of the purified product, such as 70% or more, 80% or more, 90% or more, 91% or more, 92% or more, 93% or more, 94% or more, 95% or more, 96% or more, 97% or more, 98% or more, 99% or more or 100% of the purified product.

[0147] The term “transcribe”, “transcribing” or “transcription”, as used herein, means the formation or synthesis of an RNA molecule by an RNA polymerase using a DNA molecule as a template. The RNA polymerase that can be used in the present invention includes, but is not limited to, T7-type RNA polymerase.

[0148] The term “translate”, “translating” or “translation”, as used herein, means the formation of a polypeptide molecule by a ribosome based upon an RNA template.

[0149] The term “treat”, “treating” or “treatment”, as used herein, refers to provide a beneficial or desired clinical outcome to a disease, such as eliminating the disease, alleviating the symptoms, diminishing the extent of the disease, stabilizing, ameliorating or palliating the state of the disease, or slowing the progress of a disease. Measurement of the treatment outcome may be based on, e.g., the results of a physical examination, a pathological test and/or a diagnostic test as known in the art. Treatment may also mean prolonging survival as compared to expected survival if a subject was not receiving treatment. Treatment may also refer to reducing the incidence or onset of a disease, or a recurrence thereof, as compared to that which would occur in the absence of the measure taken. Clinically, such a treatment can also be called prevention.

[0150] The term “pharmacologically acceptable carrier”, as used herein, refers to any carrier that is comprised in a pharmaceutical composition as a non-active ingredient that allows the pharmaceutical composition to have an appearance and properties suitable for administration. The pharmacologically acceptable carrier has substantially no long term or permanent detrimental effect when administered to a subject, such as a stabilizer, diluent, additive, auxiliary, excipient and the like. “Pharmaceutically acceptable carrier” should be a pharmaceutically inert material that has substantially no biological activity and constitutes a substantial part of the formulation.

[0151] The terms “subject” and “patient” may be used interchangeably herein. The term “subject”, as used herein, refers to any organism to which the active agent of the composition of the present invention may be administered, e.g., for experimental, diagnostic, prophylactic, and/or therapeutic purposes. Typical subjects include animals (e.g., mammals such as mice, rats, rabbits, non-human primates such as chimpanzees and other apes and monkey species, and humans). The subject may be a mammal, particularly a human, including a male or female, and including a neonatal, infant, juvenile, adolescent, adult or geriatric, and further is inclusive of various races and ethnicities.

[0152] The terms “therapeutically effective amount” and “effective amount”, as used herein, can be used interchangeably and refer to an amount effective, at dosages and for periods of time necessary, to achieve a desired therapeutic result. A therapeutically effective amount may vary according to factors such as the disease state, age, sex, and weight of the individual, and the ability of a therapeutic or a combination of therapeutics to elicit a desired response in the individual. An “effective amount” can designate an amount that causes a detectable change in biological or chemical activity. The detectable changes may be detected and/or further quantified by one skilled in the art for the relevant mechanism or process. Moreover, an “effective amount” can designate an amount that maintains a desired physiological state, i.e., reduces or prevents significant decline and/or promotes improvement in the condition.

[0153] Circular RNA, the Preparation and the Use Thereof

[0154] Circular RNA (circRNA) has been artificially constructed to express proteins. Such circular RNA generally comprises IRES and protein coding sequence.

[0155] In the present invention, we introduce poly A sequence into the circRNA molecule. The circRNA with poly A sequence can be effectively and feasibly purified by oligo dT resin with high purity. The circRNA with poly A sequence is also found to be superior in improving protein expression level and biological function, compared with circRNA counterpart without poly A sequence.

[0156] In some embodiments, the present invention relates to a circular RNA, the circular RNA comprising, in the following order, a IRES element, a protein coding sequence and a polyA, i.e., the IRES element is positioned on 5′ of the protein coding sequence and the polyA is positioned on 3′ of the protein coding sequence.

[0157] The IRES may derived from a virus. The IRES may be generally about 10 nt to 1000 nt or more in length, typically about 500 nt to about 1000 nt in length. In some embodiments, the IRES sequence is an IRES sequence from Coxsackievirus B3 (CVB3) or Coxsackievirus A (CVB1/2), Encephalomyocarditis virus (EMCV), Taura syndrome virus, Triatoma virus, Theiler's encephalomyelitis virus, simian Virus 40, Solenopsis invicta virus 1, Rhopalosiphum padi virus, Reticuloendotheliosis virus, fuman poliovirus 1, Plautia stali intestine virus, Kashmir bee virus, Human rhinovirus 2, Homalodisca coagulata virus-1, Human Immunodeficiency Virus type 1, Homalodisca coagulata virus-1, Himetobi P virus, Hepatitis C virus, Hepatitis A virus, Hepatitis GB virus, foot and mouth disease virus, Human enterovirus 71, Equine rhinitis virus, Ectropis obliqua picorna-like virus, Drosophila C Virus, Crucifer tobamo virus, Cricket paralysis virus, Bovine viral diarrhea virus 1, Black Queen Cell Virus, Aphid lethal paralysis virus, Avian encephalomyelitis virus, Acute bee paralysis virus, Hibiscus chlorotic ringspot virus, Classical swine fever virus, Human FGF2, Human SFTPA1, Human AMLURUNX1, Drosophila antennapedia, Human AQP4, Human AT1R, Human BAG-1, Human BCL2, Human BiP, Human c-IAP1, Human c-myc, Human eIF4G, Mouse NDST4L, Human LEF1, Mouse HIF1 alpha, Human n.myc, Mouse Gtx, Human p27kipl, Human PDGF2/c-sis, Human p53, Human Pim-1, Mouse Rbm3, Drosophila reaper, Canine Scamper, Drosophila Ubx, Human UNR, Mouse UtrA, Human VEGF-A, Human XIAP, Salivirus, Cosavirus, Parechovirus, Drosophila hairless, S. cerevisiae TFIID, S. cerevisiae YAP1, Human c-src, Human FGF-1, Simian picomavirus, Turnip crinkle virus, an aptamer to eIF4G. In some embodiments, the IRES is an IRES sequence of Coxsackievirus B3 (CVB3).

[0158] The protein coding sequence may encode one or more proteins. The protein coding sequence may encode a protein of eukaryotic or prokaryotic origin. The protein coding sequence may encode human protein or non-human protein. The protein coding sequence may encode a protein for therapeutic use. In some embodiments, the protein may be an antibody, an antigen, a cytokine, an enzyme, a fluorescent protein, a chimeric antigen receptor (CAR), a T cell receptor (TCR), or a fusion protein comprising an antibody, an antigen, a cytokine, an enzyme or a fluorescent protein.

[0159] The term “therapeutic protein”, as used herein, refers to any protein that has a therapeutic, diagnostic, and/or prophylactic effect and/or elicits a desired biological and/or pharmacological effect when administered to a subject.

[0160] In some embodiments, the CAR comprises a binding domain which can specifically bind a tumor antigen, such as mesothelin. The binding domain may comprise an antibody or a ligand to a tumor antigen or a tumor surface receptor. In some embodiments, the tumor antigen or the tumor surface receptor may be mesothelin. In some embodiments, the binding domain may comprise, e.g., anti-mesothelin scFv. In some embodiments, the light chain variable region of the antibody against mesothelin comprises LCDR1, LCDR2, and LCDR3 as set forth in SEQ ID NOs: 576-578 respectively. In some embodiments, the heavy chain variable region of the antibody against mesothelin comprises HCDR1, HCDR2, and HCDR3 as set forth in SEQ ID NOs: 579-581 respectively. In some embodiments, the light chain variable region of the antibody against mesothelin comprises the sequence as set forth in SEQ ID NO: 574. In some embodiments, the heavy chain variable region of the antibody against mesothelin comprises the sequence as set forth in SEQ ID NO: 575. In some embodiments, the anti-mesothelin scFv comprises a sequence as set forth in SEQ ID NO: 598. In some embodiments, the CAR comprises a sequence as set forth in SEQ ID NO: 599.

[0161] In some embodiments, the protein encoded by the protein coding sequence comprises an antibody or a CAR comprising the antibody as a binding domain, wherein the antibody specifically binds to TSHR, CD19; CD123; CD22; CD30; CD171; CS-1; C-type lectin-like molecule-1, CD33; epidermal growth factor receptor variant III (EGFRvIII); ganglioside G2 (GD2); ganglioside GD3; TNF receptor family member; B-cell maturation antigen; Tn antigen ((Tn Ag) or (GalNAca-Ser/Thr)); prostate-specific membrane antigen (PSMA); Receptor tyrosine kinase-like orphan receptor 1 (ROR1); Fms-Like Tyrosine Kinase 3 (FLT3); Tumor-associated glycoprotein 72 (TAG72); CD38; CD44v6; Carcinoembryonic antigen (CEA); Epithelial cell adhesion molecule (EPCAM); B7H3 (CD276); KIT (CD117); Interleukin-13 receptor subunit alpha-2; Mesothelin; Interleukin 11 receptor alpha (IL-11Ra); prostate stem cell antigen (PSCA); Protease Serine 21; vascular endothelial growth factor receptor 2 (VEGFR2); Lewis(Y) antigen; CD24; Platelet-derived growth factor receptor beta (PDGFR-beta); Stage-specific embryonic antigen-4 (SSEA-4); CD20; Folate receptor alpha; Receptor tyrosine-protein kinase ERBB2 (Her2/neu); Mucin 1, cell surface associated (MUC1); epidermal growth factor receptor (EGFR); neural cell adhesion molecule (NCAM); Prostase; prostatic acid phosphatase (PAP); elongation factor 2 mutated (ELF2M); Ephrin B2; fibroblast activation protein alpha (FAP); insulin-like growth factor 1 receptor (IGF-I receptor), carbonic anhydrase IX (CAIX); Proteasome (Prosome, Macropain) Subunit, Beta Type, 9 (LMP2); glycoprotein 100 (gplOO); oncogene polypeptide consisting of breakpoint cluster region (BCR) and Abelson murine leukemia viral oncogene homolog 1 (Abl) (bcr-abl); tyrosinase; ephrin type-A receptor 2 (EphA2); Fucosyl GM1; sialyl Lewis adhesion molecule (sLe); ganglioside GM3; transglutaminase 5 (TGS5); high molecular weight-melanoma-associated antigen (HMWMAA); o-acetyl-GD2 ganglioside (OAcGD2); Folate receptor beta; tumor endothelial marker 1 (TEM1/CD248); tumor endothelial marker 7-related (TEM7R); claudin 6 (CLDN6); thyroid stimulating hormone receptor (TSHR); G protein-coupled receptor class C group 5, member D (GPRC5D); chromosome X open reading frame 61 (CXORF61); CD97; CD179a; anaplastic lymphoma kinase (ALK); Polysialic acid; placenta-specific 1 (PLAC1); hexasaccharide portion of globoH glycoceramide (GloboH); mammary gland differentiation antigen (NY-BR-1); uroplakin 2 (UPK2); Hepatitis A virus cellular receptor 1 (HAVCR1); adrenoceptor beta 3 (ADRB3); pannexin 3 (PANX3); G protein-coupled receptor 20 (GPR20); lymphocyte antigen 6 complex, locus K 9 (LY6K); Olfactory receptor 51E2 (OR51E2); TCR Gamma Alternate Reading Frame Protein (TARP); Wilms tumor protein (WTl); Cancer/testis antigen 1 (NY-ESO-1); Cancer/testis antigen 2 (LAGE-la); Melanoma-associated antigen 1 (MAGE-A1); ETS translocation-variant gene 6, located on chromosome 12p (ETV6-AML); sperm protein 17 (SPA 17); X Antigen Family, Member 1A (XAGE1); angiopoietin-binding cell surface receptor 2 (Tie 2); melanoma cancer testis antigen-1 (MAD-CT-1); melanoma cancer testis antigen-2 (MAD-CT-2); Fos-related antigen 1; tumor protein p53 (p53); p53 mutant; prostein; surviving; telomerase; prostate carcinoma tumor antigen-1, melanoma antigen recognized by T cells 1; Rat sarcoma (Ras) mutant; human Telomerase reverse transcriptase (hTERT); sarcoma translocation breakpoints; melanoma inhibitor of apoptosis (ML-IAP); ERG (transmembrane protease, serine 2 (TMPRSS2) ETS fusion gene); N-Acetyl glucosaminyl-transferase V (NA17); paired box protein Pax-3 (PAX3); Androgen receptor; Cyclin B1; v-myc avian myelocytomatosis viral oncogene neuroblastoma derived homolog (MYCN); Ras Homolog Family Member C (RhoC); Tyrosinase-related protein 2 (TRP-2); Cytochrome P450 1B 1 (CYP1B1); CCCTC-Binding Factor (Zinc Finger Protein)-Like, Squamous Cell Carcinoma Antigen Recognized By T Cells 3 (SART3); Paired box protein Pax-5 (PAX5); proacrosin binding protein sp32 (OY-TES1); lymphocyte-specific protein tyrosine kinase (LCK); A kinase anchor protein 4 (AKAP-4); synovial sarcoma, X breakpoint 2 (SSX2); Receptor for Advanced Glycation Endproducts (RAGE-1); renal ubiquitous 1 (RU1); renal ubiquitous 2 (RU2); legumain; human papilloma virus E6 (HPV E6); human papilloma virus E7 (HPV E7); intestinal carboxyl esterase; heat shock protein 70-2 mutated (mut hsp70-2); CD79a; CD79b; CD72; Leukocyte-associated immunoglobulin-like receptor 1 (LAIRI); Fc fragment of IgA receptor (FCAR or CD89); Leukocyte immunoglobulin-like receptor subfamily A member 2 (LILRA2); CD300 molecule-like family member f (CD300LF); C-type lectin domain family 12 member A (CLEC12A); bone marrow stromal cell antigen 2 (BST2); EGF-like module-containing mucin-like hormone receptor-like 2 (EMR2); lymphocyte antigen 75 (LY75); Glypican-3 (GPC3); Fc receptor-like 5 (FCRL5); and immunoglobulin lambda-like polypeptide 1 (IGLL1).

[0162] In some embodiments, the antibody specifically binds to mesothelin, CD123, BCMA, HER2, IL13Ra2, B7H3 or CD40. In some embodiments, the antibody is a scFv. In some embodiments, the scFv comprises a heavy chain variable region (VH) fused to N-terminal or C-terminal of a light chain variable region (VL). In some embodiments, an amino acid linker may be positioned between the VH and VL in the scFv.

[0163] In some embodiments, the antibody specifically binds to mesothelin, which is also called anti-mesothelin (or anti-MESO or anti-MSLN) antibody, is the antibody described in PCT/CN2022/112726 (which is incorporated herein by reference in its entirety), including a light chain variable region comprising LCDR1, LCDR2 and LCDR3 and a heavy chain variable region comprising HCDR1, HCDR2, and HCDR3, wherein LCDR1, LCDR2, LCDR3, HCDR1, HCDR2, and HCDR3 are selected from the following group:
[0164] (1) a LCDR1 as set forth in SEQ ID NO: 1, a LCDR2 as set forth in SEQ ID NO: 16, a LCDR3 as set forth in SEQ ID NO: 30, a HCDR1 as set forth in SEQ ID NO: 45, a HCDR2 as set forth in SEQ ID NO: 58 and a HCDR3 as set forth in SEQ ID NO: 71;
[0165] (2) a LCDR1 as set forth in SEQ ID NO: 2, a LCDR2 as set forth in SEQ ID NO: 17, a LCDR3 as set forth in SEQ ID NO: 31, a HCDR1 as set forth in SEQ ID NO: 46, a HCDR2 as set forth in SEQ ID NO: 59 and a HCDR3 as set forth in SEQ ID NO: 72;
[0166] (3) a LCDR1 as set forth in SEQ ID NO: 3, a LCDR2 as set forth in SEQ ID NO: 18, a LCDR3 as set forth in SEQ ID NO: 32, a HCDR1 as set forth in SEQ ID NO: 47, a HCDR2 as set forth in SEQ ID NO: 60 and a HCDR3 as set forth in SEQ ID NO: 73;
[0167] (4) a LCDR1 as set forth in SEQ ID NO: 4, a LCDR2 as set forth in SEQ ID NO: 19, a LCDR3 as set forth in SEQ ID NO: 33, a HCDR1 as set forth in SEQ ID NO: 48, a HCDR2 as set forth in SEQ ID NO: 61 and a HCDR3 as set forth in SEQ ID NO: 74;
[0168] (5) a LCDR1 as set forth in SEQ ID NO: 5, a LCDR2 as set forth in SEQ ID NO: 20, a LCDR3 as set forth in SEQ ID NO: 34, a HCDR1 as set forth in SEQ ID NO: 49, a HCDR2 as set forth in SEQ ID NO: 62 and a HCDR3 as set forth in SEQ ID NO: 75;
[0169] (6) a LCDR1 as set forth in SEQ ID NO: 6, a LCDR2 as set forth in SEQ ID NO: 21, a LCDR3 as set forth in SEQ ID NO: 35, a HCDR1 as set forth in SEQ ID NO: 50, a HCDR2 as set forth in SEQ ID NO: 63 and a HCDR3 as set forth in SEQ ID NO: 76;
[0170] (7) a LCDR1 as set forth in SEQ ID NO: 7, a LCDR2 as set forth in SEQ ID NO: 22, a LCDR3 as set forth in SEQ ID NO: 36, a HCDR1 as set forth in SEQ ID NO: 51, a HCDR2 as set forth in SEQ ID NO: 64 and a HCDR3 as set forth in SEQ ID NO: 77;
[0171] (8) a LCDR1 as set forth in SEQ ID NO: 8, a LCDR2 as set forth in SEQ ID NO: 23, a LCDR3 as set forth in SEQ ID NO: 37, a HCDR1 as set forth in SEQ ID NO: 52, a HCDR2 as set forth in SEQ ID NO: 65 and a HCDR3 as set forth in SEQ ID NO: 78;
[0172] (9) a LCDR1 as set forth in SEQ ID NO: 9, a LCDR2 as set forth in SEQ ID NO: 24, a LCDR3 as set forth in SEQ ID NO: 38, a HCDR1 as set forth in SEQ ID NO: 53, a HCDR2 as set forth in SEQ ID NO: 66 and a HCDR3 as set forth in SEQ ID NO: 79;
[0173] (10) a LCDR1 as set forth in SEQ ID NO: 10, a LCDR2 as set forth in SEQ ID NO: 25, a LCDR3 as set forth in SEQ ID NO: 39, a HCDR1 as set forth in SEQ ID NO: 48, a HCDR2 as set forth in SEQ ID NO: 61 and a HCDR3 as set forth in SEQ ID NO: 80;
[0174] (11) a LCDR1 as set forth in SEQ ID NO: 11, a LCDR2 as set forth in SEQ ID NO: 26, a LCDR3 as set forth in SEQ ID NO: 40, a HCDR1 as set forth in SEQ ID NO: 54, a HCDR2 as set forth in SEQ ID NO: 67 and a HCDR3 as set forth in SEQ ID NO: 81;
[0175] (12) a LCDR1 as set forth in SEQ ID NO: 12, a LCDR2 as set forth in SEQ ID NO: 27, a LCDR3 as set forth in SEQ ID NO: 41, a HCDR1 as set forth in SEQ ID NO: 53, a HCDR2 as set forth in SEQ ID NO: 66 and a HCDR3 as set forth in SEQ ID NO: 82;
[0176] (13) a LCDR1 as set forth in SEQ ID NO: 13, a LCDR2 as set forth in SEQ ID NO: 28, a LCDR3 as set forth in SEQ ID NO: 42, a HCDR1 as set forth in SEQ ID NO: 55, a HCDR2 as set forth in SEQ ID NO: 68 and a HCDR3 as set forth in SEQ ID NO: 83;
[0177] (14) a LCDR1 as set forth in SEQ ID NO: 14, a LCDR2 as set forth in SEQ ID NO: 29, a LCDR3 as set forth in SEQ ID NO: 43, a HCDR1 as set forth in SEQ ID NO: 56, a HCDR2 as set forth in SEQ ID NO: 69 and a HCDR3 as set forth in SEQ ID NO: 84; and
[0178] (15) a LCDR1 as set forth in SEQ ID NO: 15, a LCDR2 as set forth in SEQ ID NO: 18, a LCDR3 as set forth in SEQ ID NO: 44, a HCDR1 as set forth in SEQ ID NO: 57, a HCDR2 as set forth in SEQ ID NO: 70 and a HCDR3 as set forth in SEQ ID NO: 85.

[0179] In some embodiments, the anti-MESO antibody comprises a light chain variable region and a heavy chain variable region selected from the following group:
[0180] (1) a light chain variable region as set forth in SEQ ID NO: 86 and a heavy chain variable region as set forth in SEQ ID NO: 101;
[0181] (2) a light chain variable region as set forth in SEQ ID NO: 87 and a heavy chain variable region as set forth in SEQ ID NO: 102;
[0182] (3) a light chain variable region as set forth in SEQ ID NO: 88 and a heavy chain variable region as set forth in SEQ ID NO: 103;
[0183] (4) a light chain variable region as set forth in SEQ ID NO: 89 and a heavy chain variable region as set forth in SEQ ID NO: 104;
[0184] (5) a light chain variable region as set forth in SEQ ID NO: 90 and a heavy chain variable region as set forth in SEQ ID NO: 105;
[0185] (6) a light chain variable region as set forth in SEQ ID NO: 91 and a heavy chain variable region as set forth in SEQ ID NO: 106;
[0186] (7) a light chain variable region as set forth in SEQ ID NO: 92 and a heavy chain variable region as set forth in SEQ ID NO: 107;
[0187] (8) a light chain variable region as set forth in SEQ ID NO: 93 and a heavy chain variable region as set forth in SEQ ID NO: 108;
[0188] (9) a light chain variable region as set forth in SEQ ID NO: 94 and a heavy chain variable region as set forth in SEQ ID NO: 109;
[0189] (10) a light chain variable region as set forth in SEQ ID NO: 95 and a heavy chain variable region as set forth in SEQ ID NO: 100;
[0190] (11) a light chain variable region as set forth in SEQ ID NO: 96 and a heavy chain variable region as set forth in SEQ ID NO: 111;
[0191] (12) a light chain variable region as set forth in SEQ ID NO: 97 and a heavy chain variable region as set forth in SEQ ID NO: 112;
[0192] (13) a light chain variable region as set forth in SEQ ID NO: 98 and a heavy chain variable region as set forth in SEQ ID NO: 113;
[0193] (14) a light chain variable region as set forth in SEQ ID NO: 99 and a heavy chain variable region as set forth in SEQ ID NO: 114; and
[0194] (15) a light chain variable region as set forth in SEQ ID NO: 100 and a heavy chain variable region as set forth in SEQ ID NO: 115.

[0195] In some embodiments, the anti-MESO antibody is an anti-MESO scFv, which may comprise an amino acid sequence selected from SEQ ID NOs: 116-130.

[0196] In some embodiments, the antibody specifically binds to CD123, which is also called anti-CD123 antibody, is the antibody described in PCT/CN2022/112724 (which is incorporated herein by reference in its entirety), including a light chain variable region comprising LCDR1, LCDR2 and LCDR3 and a heavy chain variable region comprising HCDR1, HCDR2, and HCDR3, wherein LCDR1, LCDR2, LCDR3, HCDR1, HCDR2, and HCDR3 are selected from the following group:
[0197] (1) a LCDR1 as set forth in SEQ ID NO: 263, a LCDR2 as set forth in SEQ ID NO: 293, a LCDR3 as set forth in SEQ ID NO: 321, a HCDR1 as set forth in SEQ ID NO: 351, a HCDR2 as set forth in SEQ ID NO: 372 and a HCDR3 as set forth in SEQ ID NO: 396;
[0198] (2) a LCDR1 as set forth in SEQ ID NO: 277, a LCDR2 as set forth in SEQ ID NO: 305, a LCDR3 as set forth in SEQ ID NO: 335, a HCDR1 as set forth in SEQ ID NO: 349, a HCDR2 as set forth in SEQ ID NO: 382 and a HCDR3 as set forth in SEQ ID NO: 409;
[0199] (3) a LCDR1 as set forth in SEQ ID NO: 267, a LCDR2 as set forth in SEQ ID NO: 297, a LCDR3 as set forth in SEQ ID NO: 326, a HCDR1 as set forth in SEQ ID NO: 355, a HCDR2 as set forth in SEQ ID NO: 376 and a HCDR3 as set forth in SEQ ID NO: 400;
[0200] (4) a LCDR1 as set forth in SEQ ID NO: 278, a LCDR2 as set forth in SEQ ID NO: 292, a LCDR3 as set forth in SEQ ID NO: 336, a HCDR1 as set forth in SEQ ID NO: 360, a HCDR2 as set forth in SEQ ID NO: 383 and a HCDR3 as set forth in SEQ ID NO: 410;
[0201] (5) a LCDR1 as set forth in SEQ ID NO: 283, a LCDR2 as set forth in SEQ ID NO: 310, a LCDR3 as set forth in SEQ ID NO: 342, a HCDR1 as set forth in SEQ ID NO: 359, a HCDR2 as set forth in SEQ ID NO: 389 and a HCDR3 as set forth in SEQ ID NO: 417;
[0202] (6) a LCDR1 as set forth in SEQ ID NO: 284, a LCDR2 as set forth in SEQ ID NO: 311, a LCDR3 as set forth in SEQ ID NO: 343, a HCDR1 as set forth in SEQ ID NO: 366, a HCDR2 as set forth in SEQ ID NO: 388 and a HCDR3 as set forth in SEQ ID NO: 418;
[0203] (7) a LCDR1 as set forth in SEQ ID NO: 268, a LCDR2 as set forth in SEQ ID NO: 298, a LCDR3 as set forth in SEQ ID NO: 327, a HCDR1 as set forth in SEQ ID NO: 356, a HCDR2 as set forth in SEQ ID NO: 377 and a HCDR3 as set forth in SEQ ID NO: 401;
[0204] (8) a LCDR1 as set forth in SEQ ID NO: 264, a LCDR2 as set forth in SEQ ID NO: 294, a LCDR3 as set forth in SEQ ID NO: 322, a HCDR1 as set forth in SEQ ID NO: 349, a HCDR2 as set forth in SEQ ID NO: 370 and a HCDR3 as set forth in SEQ ID NO: 394;
[0205] (9) a LCDR1 as set forth in SEQ ID NO: 285, a LCDR2 as set forth in SEQ ID NO: 312, a LCDR3 as set forth in SEQ ID NO: 344, a HCDR1 as set forth in SEQ ID NO: 367, a HCDR2 as set forth in SEQ ID NO: 390 and a HCDR3 as set forth in SEQ ID NO: 419;
[0206] (10) a LCDR1 as set forth in SEQ ID NO: 286, a LCDR2 as set forth in SEQ ID NO: 313, a LCDR3 as set forth in SEQ ID NO: 345, a HCDR1 as set forth in SEQ ID NO: 355, a HCDR2 as set forth in SEQ ID NO: 376 and a HCDR3 as set forth in SEQ ID NO: 420;
[0207] (11) a LCDR1 as set forth in SEQ ID NO: 262, a LCDR2 as set forth in SEQ ID NO: 292, a LCDR3 as set forth in SEQ ID NO: 320, a HCDR1 as set forth in SEQ ID NO: 350, a HCDR2 as set forth in SEQ ID NO: 371 and a HCDR3 as set forth in SEQ ID NO: 395;
[0208] (12) a LCDR1 as set forth in SEQ ID NO: 277, a LCDR2 as set forth in SEQ ID NO: 306, a LCDR3 as set forth in SEQ ID NO: 337, a HCDR1 as set forth in SEQ ID NO: 361, a HCDR2 as set forth in SEQ ID NO: 384 and a HCDR3 as set forth in SEQ ID NO: 411;
[0209] (13) a LCDR1 as set forth in SEQ ID NO: 287, a LCDR2 as set forth in SEQ ID NO: 314, a LCDR3 as set forth in SEQ ID NO: 346, a HCDR1 as set forth in SEQ ID NO: 365, a HCDR2 as set forth in SEQ ID NO: 391 and a HCDR3 as set forth in SEQ ID NO: 421;
[0210] (14) a LCDR1 as set forth in SEQ ID NO: 269, a LCDR2 as set forth in SEQ ID NO: 299, a LCDR3 as set forth in SEQ ID NO: 328, a HCDR1 as set forth in SEQ ID NO: 357, a HCDR2 as set forth in SEQ ID NO: 378 and a HCDR3 as set forth in SEQ ID NO: 402;
[0211] (15) a LCDR1 as set forth in SEQ ID NO: 270, a LCDR2 as set forth in SEQ ID NO: 300, a LCDR3 as set forth in SEQ ID NO: 329, a HCDR1 as set forth in SEQ ID NO: 358, a HCDR2 as set forth in SEQ ID NO: 379 and a HCDR3 as set forth in SEQ ID NO: 403;
[0212] (16) a LCDR1 as set forth in SEQ ID NO: 282, a LCDR2 as set forth in SEQ ID NO: 309, a LCDR3 as set forth in SEQ ID NO: 341, a HCDR1 as set forth in SEQ ID NO: 365, a HCDR2 as set forth in SEQ ID NO: 388 and a HCDR3 as set forth in SEQ ID NO: 416;
[0213] (17) a LCDR1 as set forth in SEQ ID NO: 265, a LCDR2 as set forth in SEQ ID NO: 295, a LCDR3 as set forth in SEQ ID NO: 323, a HCDR1 as set forth in SEQ ID NO: 352, a HCDR2 as set forth in SEQ ID NO: 373 and a HCDR3 as set forth in SEQ ID NO: 397;
[0214] (18) a LCDR1 as set forth in SEQ ID NO: 261, a LCDR2 as set forth in SEQ ID NO: 290, a LCDR3 as set forth in SEQ ID NO: 324, a HCDR1 as set forth in SEQ ID NO: 353, a HCDR2 as set forth in SEQ ID NO: 374 and a HCDR3 as set forth in SEQ ID NO: 398;
[0215] (19) a LCDR1 as set forth in SEQ ID NO: 271, a LCDR2 as set forth in SEQ ID NO: 301, a LCDR3 as set forth in SEQ ID NO: 330, a HCDR1 as set forth in SEQ ID NO: 351, a HCDR2 as set forth in SEQ ID NO: 380 and a HCDR3 as set forth in SEQ ID NO: 404;
[0216] (20) a LCDR1 as set forth in SEQ ID NO: 261, a LCDR2 as set forth in SEQ ID NO: 291, a LCDR3 as set forth in SEQ ID NO: 319, a HCDR1 as set forth in SEQ ID NO: 349, a HCDR2 as set forth in SEQ ID NO: 370 and a HCDR3 as set forth in SEQ ID NO: 394;
[0217] (21) a LCDR1 as set forth in SEQ ID NO: 279, a LCDR2 as set forth in SEQ ID NO: 307, a LCDR3 as set forth in SEQ ID NO: 338, a HCDR1 as set forth in SEQ ID NO: 362, a HCDR2 as set forth in SEQ ID NO: 385 and a HCDR3 as set forth in SEQ ID NO: 412;
[0218] (22) a LCDR1 as set forth in SEQ ID NO: 288, a LCDR2 as set forth in SEQ ID NO: 315, a LCDR3 as set forth in SEQ ID NO: 347, a HCDR1 as set forth in SEQ ID NO: 368, a HCDR2 as set forth in SEQ ID NO: 392 and a HCDR3 as set forth in SEQ ID NO: 422;
[0219] (23) a LCDR1 as set forth in SEQ ID NO: 272, a LCDR2 as set forth in SEQ ID NO: 299, a LCDR3 as set forth in SEQ ID NO: 331, a HCDR1 as set forth in SEQ ID NO: 356, a HCDR2 as set forth in SEQ ID NO: 377 and a HCDR3 as set forth in SEQ ID NO: 405;
[0220] (24) a LCDR1 as set forth in SEQ ID NO: 273, a LCDR2 as set forth in SEQ ID NO: 302, a LCDR3 as set forth in SEQ ID NO: 332, a HCDR1 as set forth in SEQ ID NO: 355, a HCDR2 as set forth in SEQ ID NO: 376 and a HCDR3 as set forth in SEQ ID NO: 406;
[0221] (25) a LCDR1 as set forth in SEQ ID NO: 261, a LCDR2 as set forth in SEQ ID NO: 290, a LCDR3 as set forth in SEQ ID NO: 317, a HCDR1 as set forth in SEQ ID NO: 349, a HCDR2 as set forth in SEQ ID NO: 370 and a HCDR3 as set forth in SEQ ID NO: 394;
[0222] (26) a LCDR1 as set forth in SEQ ID NO: 280, a LCDR2 as set forth in SEQ ID NO: 308, a LCDR3 as set forth in SEQ ID NO: 339, a HCDR1 as set forth in SEQ ID NO: 363, a HCDR2 as set forth in SEQ ID NO: 386 and a HCDR3 as set forth in SEQ ID NO: 413;
[0223] (27) a LCDR1 as set forth in SEQ ID NO: 274, a LCDR2 as set forth in SEQ ID NO: 303, a LCDR3 as set forth in SEQ ID NO: 327, a HCDR1 as set forth in SEQ ID NO: 356, a HCDR2 as set forth in SEQ ID NO: 377 and a HCDR3 as set forth in SEQ ID NO: 401;
[0224] (28) a LCDR1 as set forth in SEQ ID NO: 261, a LCDR2 as set forth in SEQ ID NO: 290, a LCDR3 as set forth in SEQ ID NO: 318, a HCDR1 as set forth in SEQ ID NO: 349, a HCDR2 as set forth in SEQ ID NO: 370 and a HCDR3 as set forth in SEQ ID NO: 394;
[0225] (29) a LCDR1 as set forth in SEQ ID NO: 262, a LCDR2 as set forth in SEQ ID NO: 292, a LCDR3 as set forth in SEQ ID NO: 320, a HCDR1 as set forth in SEQ ID NO: 350, a HCDR2 as set forth in SEQ ID NO: 371 and a HCDR3 as set forth in SEQ ID NO: 395;
[0226] (30) a LCDR1 as set forth in SEQ ID NO: 275, a LCDR2 as set forth in SEQ ID NO: 304, a LCDR3 as set forth in SEQ ID NO: 333, a HCDR1 as set forth in SEQ ID NO: 359, a HCDR2 as set forth in SEQ ID NO: 381 and a HCDR3 as set forth in SEQ ID NO: 407;
[0227] (31) a LCDR1 as set forth in SEQ ID NO: 289, a LCDR2 as set forth in SEQ ID NO: 316, a LCDR3 as set forth in SEQ ID NO: 348, a HCDR1 as set forth in SEQ ID NO: 369, a HCDR2 as set forth in SEQ ID NO: 393 and a HCDR3 as set forth in SEQ ID NO: 423;
[0228] (32) a LCDR1 as set forth in SEQ ID NO: 282, a LCDR2 as set forth in SEQ ID NO: 309, a LCDR3 as set forth in SEQ ID NO: 341, a HCDR1 as set forth in SEQ ID NO: 364, a HCDR2 as set forth in SEQ ID NO: 387 and a HCDR3 as set forth in SEQ ID NO: 415;
[0229] (33) a LCDR1 as set forth in SEQ ID NO: 276, a LCDR2 as set forth in SEQ ID NO: 302, a LCDR3 as set forth in SEQ ID NO: 334, a HCDR1 as set forth in SEQ ID NO: 355, a HCDR2 as set forth in SEQ ID NO: 376 and a HCDR3 as set forth in SEQ ID NO: 408;
[0230] (34) a LCDR1 as set forth in SEQ ID NO: 266, a LCDR2 as set forth in SEQ ID NO: 296, a LCDR3 as set forth in SEQ ID NO: 325, a HCDR1 as set forth in SEQ ID NO: 354, a HCDR2 as set forth in SEQ ID NO: 375 and a HCDR3 as set forth in SEQ ID NO: 399; and
[0231] (35) a LCDR1 as set forth in SEQ ID NO: 281, a LCDR2 as set forth in SEQ ID NO: 305, a LCDR3 as set forth in SEQ ID NO: 340, a HCDR1 as set forth in SEQ ID NO: 349, a HCDR2 as set forth in SEQ ID NO: 382 and a HCDR3 as set forth in SEQ ID NO: 414.

[0232] In some embodiments, the anti-CD123 antibody comprises a light chain variable region and a heavy chain variable region selected from the following group:
[0233] (1) a light chain variable region as set forth in SEQ ID NO: 424 and a heavy chain variable region as set forth in SEQ ID NO: 459;
[0234] (2) a light chain variable region as set forth in SEQ ID NO: 425 and a heavy chain variable region as set forth in SEQ ID NO: 460;
[0235] (3) a light chain variable region as set forth in SEQ ID NO: 426 and a heavy chain variable region as set forth in SEQ ID NO: 461;
[0236] (4) a light chain variable region as set forth in SEQ ID NO: 427 and a heavy chain variable region as set forth in SEQ ID NO: 462;
[0237] (5) a light chain variable region as set forth in SEQ ID NO: 428 and a heavy chain variable region as set forth in SEQ ID NO: 463;
[0238] (6) a light chain variable region as set forth in SEQ ID NO: 429 and a heavy chain variable region as set forth in SEQ ID NO: 464;
[0239] (7) a light chain variable region as set forth in SEQ ID NO: 430 and a heavy chain variable region as set forth in SEQ ID NO: 465;
[0240] (8) a light chain variable region as set forth in SEQ ID NO: 431 and a heavy chain variable region as set forth in SEQ ID NO: 466;
[0241] (9) a light chain variable region as set forth in SEQ ID NO: 432 and a heavy chain variable region as set forth in SEQ ID NO: 467;
[0242] (10) a light chain variable region as set forth in SEQ ID NO: 433 and a heavy chain variable region as set forth in SEQ ID NO: 468;
[0243] (11) a light chain variable region as set forth in SEQ ID NO: 434 and a heavy chain variable region as set forth in SEQ ID NO: 469;
[0244] (12) a light chain variable region as set forth in SEQ ID NO: 435 and a heavy chain variable region as set forth in SEQ ID NO: 470;
[0245] (13) a light chain variable region as set forth in SEQ ID NO: 436 and a heavy chain variable region as set forth in SEQ ID NO: 471;
[0246] (14) a light chain variable region as set forth in SEQ ID NO: 437 and a heavy chain variable region as set forth in SEQ ID NO: 472;
[0247] (15) a light chain variable region as set forth in SEQ ID NO: 438 and a heavy chain variable region as set forth in SEQ ID NO: 473;
[0248] (16) a light chain variable region as set forth in SEQ ID NO: 439 and a heavy chain variable region as set forth in SEQ ID NO: 474;
[0249] (17) a light chain variable region as set forth in SEQ ID NO: 440 and a heavy chain variable region as set forth in SEQ ID NO: 475;
[0250] (18) a light chain variable region as set forth in SEQ ID NO: 441 and a heavy chain variable region as set forth in SEQ ID NO: 476;
[0251] (19) a light chain variable region as set forth in SEQ ID NO: 442 and a heavy chain variable region as set forth in SEQ ID NO: 477;
[0252] (20) a light chain variable region as set forth in SEQ ID NO: 443 and a heavy chain variable region as set forth in SEQ ID NO: 478;
[0253] (21) a light chain variable region as set forth in SEQ ID NO: 444 and a heavy chain variable region as set forth in SEQ ID NO: 479;
[0254] (22) a light chain variable region as set forth in SEQ ID NO: 445 and a heavy chain variable region as set forth in SEQ ID NO: 480;
[0255] (23) a light chain variable region as set forth in SEQ ID NO: 446 and a heavy chain variable region as set forth in SEQ ID NO: 481;
[0256] (24) a light chain variable region as set forth in SEQ ID NO: 447 and a heavy chain variable region as set forth in SEQ ID NO: 482;
[0257] (25) a light chain variable region as set forth in SEQ ID NO: 448 and a heavy chain variable region as set forth in SEQ ID NO: 483;
[0258] (26) a light chain variable region as set forth in SEQ ID NO: 449 and a heavy chain variable region as set forth in SEQ ID NO: 484;
[0259] (27) a light chain variable region as set forth in SEQ ID NO: 450 and a heavy chain variable region as set forth in SEQ ID NO: 485;
[0260] (28) a light chain variable region as set forth in SEQ ID NO: 451 and a heavy chain variable region as set forth in SEQ ID NO: 486;
[0261] (29) a light chain variable region as set forth in SEQ ID NO: 452 and a heavy chain variable region as set forth in SEQ ID NO: 487;
[0262] (30) a light chain variable region as set forth in SEQ ID NO: 453 and a heavy chain variable region as set forth in SEQ ID NO: 488;
[0263] (31) a light chain variable region as set forth in SEQ ID NO: 454 and a heavy chain variable region as set forth in SEQ ID NO: 489;
[0264] (32) a light chain variable region as set forth in SEQ ID NO: 455 and a heavy chain variable region as set forth in SEQ ID NO: 490;
[0265] (33) a light chain variable region as set forth in SEQ ID NO: 456 and a heavy chain variable region as set forth in SEQ ID NO: 491;
[0266] (34) a light chain variable region as set forth in SEQ ID NO: 457 and a heavy chain variable region as set forth in SEQ ID NO: 492; and
[0267] (35) a light chain variable region as set forth in SEQ ID NO: 458 and a heavy chain variable region as set forth in SEQ ID NO: 493.

[0268] In some embodiments, the anti-CD123 antibody is an anti-CD123 scFv, which may comprise an amino acid sequence selected from SEQ ID NOs: 497-531.

[0269] In some embodiments, the antibody specifically binds to BCMA, which is also called anti-BCMA antibody, is the antibody described in PCT/CN2022/112728 (which is incorporated herein by reference in its entirety), including a light chain variable region comprising LCDR1, LCDR2 and LCDR3 and a heavy chain variable region comprising HCDR1, HCDR2, and HCDR3, wherein LCDR1, LCDR2, LCDR3, HCDR1, HCDR2, and HCDR3 are selected from the following group:
[0270] (1) a LCDR1 as set forth in SEQ ID NO: 146, a LCDR2 as set forth in SEQ ID NO: 156, a LCDR3 as set forth in SEQ ID NO: 167, a HCDR1 as set forth in SEQ ID NO: 178, a HCDR2 as set forth in SEQ ID NO: 189 and a HCDR3 as set forth in SEQ ID NO: 201;
[0271] (2) a LCDR1 as set forth in SEQ ID NO: 147, a LCDR2 as set forth in SEQ ID NO: 157, a LCDR3 as set forth in SEQ ID NO: 168, a HCDR1 as set forth in SEQ ID NO: 179, a HCDR2 as set forth in SEQ ID NO: 190 and a HCDR3 as set forth in SEQ ID NO: 202;
[0272] (3) a LCDR1 as set forth in SEQ ID NO: 148, a LCDR2 as set forth in SEQ ID NO: 158, a LCDR3 as set forth in SEQ ID NO: 169, a HCDR1 as set forth in SEQ ID NO: 180, a HCDR2 as set forth in SEQ ID NO: 191 and a HCDR3 as set forth in SEQ ID NO: 203;
[0273] (4) a LCDR1 as set forth in SEQ ID NO: 149, a LCDR2 as set forth in SEQ ID NO: 159, a LCDR3 as set forth in SEQ ID NO: 169, a HCDR1 as set forth in SEQ ID NO: 181, a HCDR2 as set forth in SEQ ID NO: 192 and a HCDR3 as set forth in SEQ ID NO: 204;
[0274] (5) a LCDR1 as set forth in SEQ ID NO: 150, a LCDR2 as set forth in SEQ ID NO: 160, a LCDR3 as set forth in SEQ ID NO: 170, a HCDR1 as set forth in SEQ ID NO: 182, a HCDR2 as set forth in SEQ ID NO: 193 and a HCDR3 as set forth in SEQ ID NO: 205;
[0275] (6) a LCDR1 as set forth in SEQ ID NO: 151, a LCDR2 as set forth in SEQ ID NO: 161, a LCDR3 as set forth in SEQ ID NO: 171, a HCDR1 as set forth in SEQ ID NO: 183, a HCDR2 as set forth in SEQ ID NO: 194 and a HCDR3 as set forth in SEQ ID NO: 206;
[0276] (7) a LCDR1 as set forth in SEQ ID NO: 152, a LCDR2 as set forth in SEQ ID NO: 162, a LCDR3 as set forth in SEQ ID NO: 172, a HCDR1 as set forth in SEQ ID NO: 180, a HCDR2 as set forth in SEQ ID NO: 195 and a HCDR3 as set forth in SEQ ID NO: 207;
[0277] (8) a LCDR1 as set forth in SEQ ID NO: 153, a LCDR2 as set forth in SEQ ID NO: 163, a LCDR3 as set forth in SEQ ID NO: 173, a HCDR1 as set forth in SEQ ID NO: 184, a HCDR2 as set forth in SEQ ID NO: 196 and a HCDR3 as set forth in SEQ ID NO: 208;
[0278] (9) a LCDR1 as set forth in SEQ ID NO: 147, a LCDR2 as set forth in SEQ ID NO: 164, a LCDR3 as set forth in SEQ ID NO: 174, a HCDR1 as set forth in SEQ ID NO: 185, a HCDR2 as set forth in SEQ ID NO: 197 and a HCDR3 as set forth in SEQ ID NO: 209;
[0279] (10) a LCDR1 as set forth in SEQ ID NO: 147, a LCDR2 as set forth in SEQ ID NO: 165, a LCDR3 as set forth in SEQ ID NO: 175, a HCDR1 as set forth in SEQ ID NO: 186, a HCDR2 as set forth in SEQ ID NO: 198 and a HCDR3 as set forth in SEQ ID NO: 210;
[0280] (11) a LCDR1 as set forth in SEQ ID NO: 154, a LCDR2 as set forth in SEQ ID NO: 166, a LCDR3 as set forth in SEQ ID NO: 176, a HCDR1 as set forth in SEQ ID NO: 187, a HCDR2 as set forth in SEQ ID NO: 199 and a HCDR3 as set forth in SEQ ID NO: 211; and
[0281] (12) a LCDR1 as set forth in SEQ ID NO: 155, a LCDR2 as set forth in SEQ ID NO: 159, a LCDR3 as set forth in SEQ ID NO: 177, a HCDR1 as set forth in SEQ ID NO: 188, a HCDR2 as set forth in SEQ ID NO: 200 and a HCDR3 as set forth in SEQ ID NO: 212.

[0282] In some embodiments, the anti-BCMA antibody comprises a light chain variable region and a heavy chain variable region selected from the following group:
[0283] (1) a light chain variable region as set forth in SEQ ID NO: 213 and a heavy chain variable region as set forth in SEQ ID NO: 225;
[0284] (2) a light chain variable region as set forth in SEQ ID NO: 214 and a heavy chain variable region as set forth in SEQ ID NO: 226;
[0285] (3) a light chain variable region as set forth in SEQ ID NO: 215 and a heavy chain variable region as set forth in SEQ ID NO: 227;
[0286] (4) a light chain variable region as set forth in SEQ ID NO: 216 and a heavy chain variable region as set forth in SEQ ID NO: 228;
[0287] (5) a light chain variable region as set forth in SEQ ID NO: 217 and a heavy chain variable region as set forth in SEQ ID NO: 229;
[0288] (6) a light chain variable region as set forth in SEQ ID NO: 218 and a heavy chain variable region as set forth in SEQ ID NO: 230;
[0289] (7) a light chain variable region as set forth in SEQ ID NO: 219 and a heavy chain variable region as set forth in SEQ ID NO: 231;
[0290] (8) a light chain variable region as set forth in SEQ ID NO: 220 and a heavy chain variable region as set forth in SEQ ID NO: 232;
[0291] (9) a light chain variable region as set forth in SEQ ID NO: 221 and a heavy chain variable region as set forth in SEQ ID NO: 233;
[0292] (10) a light chain variable region as set forth in SEQ ID NO: 222 and a heavy chain variable region as set forth in SEQ ID NO: 234;
[0293] (11) a light chain variable region as set forth in SEQ ID NO: 223 and a heavy chain variable region as set forth in SEQ ID NO: 235; and
[0294] (12) a light chain variable region as set forth in SEQ ID NO: 224 and a heavy chain variable region as set forth in SEQ ID NO: 236.

[0295] In some embodiments, the anti-BCMA antibody is an anti-BCMA scFv, which may comprise an amino acid sequence selected from SEQ ID NOs: 237-248.

[0296] In some embodiments, the antibody specifically binds to CD19, which is also called anti-CD19 antibody, is the antibody described in CN202210274255.1 (published as CN114349863A, which is incorporated herein by reference in its entirety), including a light chain variable region comprising LCDR1, LCDR2 and LCDR3 and a heavy chain variable region comprising HCDR1, HCDR2, and HCDR3, wherein LCDR1, LCDR2, LCDR3, HCDR1, HCDR2, and HCDR3 are: a LCDR1 as set forth in SEQ ID NO: 542, a LCDR2 as set forth in SEQ ID NO: 543, a LCDR3 as set forth in SEQ ID NO: 544, a HCDR1 as set forth in SEQ ID NO: 545, a HCDR2 as set forth in SEQ ID NO: 546 and a HCDR3 as set forth in SEQ ID NO: 547.

[0297] In some embodiments, the anti-CD19 antibody comprises a light chain variable region as set forth in SEQ ID NO: 549 and a heavy chain variable region as set forth in SEQ ID NO: 548. In some embodiments, the anti-CD19 antibody is an anti-CD19 scFv, which may comprise an amino acid sequence as set forth in SEQ ID NO: 550.

[0298] In some embodiments, the antibody specifically binds to HER2, which is also called anti-HER2 antibody, is the antibody described in CN202210750853.1 (published as CN114805584A, which is incorporated herein by reference in its entirety), including a light chain variable region comprising LCDR1, LCDR2 and LCDR3 and a heavy chain variable region comprising HCDR1, HCDR2, and HCDR3, wherein LCDR1, LCDR2, LCDR3, HCDR1, HCDR2, and HCDR3 are: a LCDR1 as set forth in SEQ ID NO: 532, a LCDR2 as set forth in SEQ ID NO: 533, a LCDR3 as set forth in SEQ ID NO: 534, a HCDR1 as set forth in SEQ ID NO: 535, a HCDR2 as set forth in SEQ ID NO: 536 and a HCDR3 as set forth in SEQ ID NO: 537.

[0299] In some embodiments, the anti-HER2 antibody comprises a light chain variable region as set forth in SEQ ID NO: 538 and a heavy chain variable region as set forth in SEQ ID NO: 539. In some embodiments, the anti-HER2 antibody is an anti-HER2 scFv, which may comprise an amino acid sequence as set forth in SEQ ID NO: 540.

[0300] In some embodiments, the antibody specifically binds to IL13Ra2, which is also called anti-IL13Ra2 antibody, is the antibody described in CN202210743595.4 (published as CN114805581A, which is incorporated herein by reference in its entirety) including a light chain variable region comprising LCDR1, LCDR2 and LCDR3 and a heavy chain variable region comprising HCDR1, HCDR2, and HCDR3, wherein LCDR1, LCDR2, LCDR3, HCDR1, HCDR2, and HCDR3 are: a LCDR1 as set forth in SEQ ID NO: 552, a LCDR2 as set forth in SEQ ID NO: 553, a LCDR3 as set forth in SEQ ID NO: 554, a HCDR1 as set forth in SEQ ID NO: 555, a HCDR2 as set forth in SEQ ID NO: 556 and a HCDR3 as set forth in SEQ ID NO: 557.

[0301] In some embodiments, the anti-IL13Ra2 antibody comprises a light chain variable region as set forth in SEQ ID NO: 558 and a heavy chain variable region as set forth in SEQ ID NO: 559. In some embodiments, the anti-IL13Ra2 antibody is an anti-IL13Ra2 scFv, which may comprise an amino acid sequence as set forth in SEQ ID NO: 560.

[0302] In some embodiments, the antibody specifically binds to B7H3, which is also called anti-B7H3 antibody, is the antibody described in CN202210714289.8 (published as CN114773477A, which is incorporated herein by reference in its entirety), including a light chain variable region comprising LCDR1, LCDR2 and LCDR3 and a heavy chain variable region comprising HCDR1, HCDR2, and HCDR3, wherein LCDR1, LCDR2, LCDR3, HCDR1, HCDR2, and HCDR3 are: a LCDR1 as set forth in SEQ ID NO: 562, a LCDR2 as set forth in SEQ ID NO: 563, a LCDR3 as set forth in SEQ ID NO: 564, a HCDR1 as set forth in SEQ ID NO: 565, a HCDR2 as set forth in SEQ ID NO: 566 and a HCDR3 as set forth in SEQ ID NO: 567.

[0303] In some embodiments, the anti-B7H3 antibody comprises a light chain variable region as set forth in SEQ ID NO: 568 and a heavy chain variable region as set forth in SEQ ID NO: 569. In some embodiments, the anti-B7H3 antibody is an anti-B7H3 scFv, which may comprise an amino acid sequence as set forth in SEQ ID NO: 570.

[0304] In some embodiments, the antibody specifically binds to CD40, which is also called anti-CD40 antibody, is the antibody described in PCT/CN2022/112730 (which is incorporated herein by reference in its entirety), including a light chain variable region comprising LCDR1, LCDR2 and LCDR3 and a heavy chain variable region comprising HCDR1, HCDR2, and HCDR3, wherein LCDR1, LCDR2, LCDR3, HCDR1, HCDR2, and HCDR3 are selected from the following group:
[0305] (1) a LCDR1 as set forth in SEQ ID NO: 828, a LCDR2 as set forth in SEQ ID NO: 834, a LCDR3 as set forth in SEQ ID NO: 840, a HCDR1 as set forth in SEQ ID NO: 846, a HCDR2 as set forth in SEQ ID NO: 852 and a HCDR3 as set forth in SEQ ID NO: 858;
[0306] (2) a LCDR1 as set forth in SEQ ID NO: 829, a LCDR2 as set forth in SEQ ID NO: 835, a LCDR3 as set forth in SEQ ID NO: 841, a HCDR1 as set forth in SEQ ID NO: 847, a HCDR2 as set forth in SEQ ID NO: 853 and a HCDR3 as set forth in SEQ ID NO: 859;
[0307] (3) a LCDR1 as set forth in SEQ ID NO: 830, a LCDR2 as set forth in SEQ ID NO: 836, a LCDR3 as set forth in SEQ ID NO: 842, a HCDR1 as set forth in SEQ ID NO: 848, a HCDR2 as set forth in SEQ ID NO: 854 and a HCDR3 as set forth in SEQ ID NO: 860;
[0308] (4) a LCDR1 as set forth in SEQ ID NO: 831, a LCDR2 as set forth in SEQ ID NO: 837, a LCDR3 as set forth in SEQ ID NO: 843, a HCDR1 as set forth in SEQ ID NO: 849, a HCDR2 as set forth in SEQ ID NO: 855 and a HCDR3 as set forth in SEQ ID NO: 861;
[0309] (5) a LCDR1 as set forth in SEQ ID NO: 832, a LCDR2 as set forth in SEQ ID NO: 838, a LCDR3 as set forth in SEQ ID NO: 844, a HCDR1 as set forth in SEQ ID NO: 850, a HCDR2 as set forth in SEQ ID NO: 856 and a HCDR3 as set forth in SEQ ID NO: 862; and
[0310] (6) a LCDR1 as set forth in SEQ ID NO: 833, a LCDR2 as set forth in SEQ ID NO: 839, a LCDR3 as set forth in SEQ ID NO: 845, a HCDR1 as set forth in SEQ ID NO: 851, a HCDR2 as set forth in SEQ ID NO: 857 and a HCDR3 as set forth in SEQ ID NO: 863.

[0311] In some embodiments, the anti-CD40 antibody comprises a light chain variable region and a heavy chain variable region selected from the following group:
[0312] (1) a light chain variable region as set forth in SEQ ID NO: 864 and a heavy chain variable region as set forth in SEQ ID NO: 870;
[0313] (2) a light chain variable region as set forth in SEQ ID NO: 865 and a heavy chain variable region as set forth in SEQ ID NO: 971;
[0314] (3) a light chain variable region as set forth in SEQ ID NO: 866 and a heavy chain variable region as set forth in SEQ ID NO: 872;
[0315] (4) a light chain variable region as set forth in SEQ ID NO: 867 and a heavy chain variable region as set forth in SEQ ID NO: 873;
[0316] (5) a light chain variable region as set forth in SEQ ID NO: 868 and a heavy chain variable region as set forth in SEQ ID NO: 874; and
[0317] (6) a light chain variable region as set forth in SEQ ID NO: 869 and a heavy chain variable region as set forth in SEQ ID NO: 875.

[0318] In some embodiments, the anti-CD40 antibody is an anti-CD40 scFv, which may comprise an amino acid sequence selected from SEQ ID NOs: 888-893.

[0319] In some embodiments, the protein coding sequence may encode a CAR. In some embodiments, the CAR comprises a binding domain which can specifically bind to mesothelin, CD123, BCMA, HER2, IL13Ra2, B7H3 or CD40. In some embodiments, the binding domain may comprise an antibody that specifically binds to mesothelin, CD123, BCMA, HER2, IL13Ra2, B7H3 or CD40. In some embodiments, the binding domain may be a scFv that specifically binds to mesothelin, CD123, BCMA, HER2, IL13Ra2, B7H3 or CD40.

[0320] The CAR may also comprise a signaling peptide, a hinge region, a transmembrane domain and an intracellular signaling domain. The intracellular signaling domain may further comprise a co-stimulatory domain. In some embodiments, the signaling peptide may comprise a CD8 signal peptide or a GM-CSF signal peptide. In some embodiments, the hinge region of the CAR may comprise a hinge domain of CD28, CD8, IgG1, IgG4, IgD, 4-1B1. (D4, CD27, CD7, CD8A, PD-1, ICOS, OX40, NKG2D, NKG2C, FcεRIγ, BTLA, GIIR, DAP10, TIM1, SLAM, CD30 or LIGHT, preferably, a CD8 hinge domain. In some embodiments, the transmembrane domain of the CAR may comprise the transmembrane domain of CD8, CD28, CD3ε (CD3e), 4-1BB, CD4, CD27, CD7, PD-1, TRAC, TRBC, CD3ζ, CTLA-4, LAG-3, CD5, ICOS, OX40, NKG2D, 2B4, CD244, FcεRIγ, BTLA, CD30, GITR, HVEM, DAP10, CD2, NKG2C, LIGHT, DAP12. CD40L (CD154), TIM1, CD226, DR3, CD45, CD80, CD86, CD9, CD16, CD22, CD33, CD37, CD64 or SLAM, preferably a CD8 transmembrane (TM) domain. In some embodiments, the intracellular signaling domain of the CAR may comprise the intracellular signaling domain of CD3ζ, CD3δ, CD3γ, CD3ε, CD79a, CD79b, FeeRIγ, FceRIβ, FcγRlla, DA P10 or DAP-12, preferably CD3ζ intracellular signaling domain. In some embodiments, the intracellular signaling domain of the CAR may further comprise a co-stimulatory domain, such as the co-stimulatory domain of CD28, 4-1BB (CD137), CD27, CD2, CD7, CD8A, CD8B, OX40, CD226, DR3, SLAM, CDS, ICAM-1, NKG2D, NKG2C, B7413, 2B4, FcεRIγ, BTLA, GITR, HVEM, DAP10, DAP12, CD30, CD40, CD40L, TIM1, PD-1, LFA-1, LIGHT, JAML, CD244, CD100, ICOS, CD40 or MyD88, preferably a 4-1BB co-stimulatory domain.

[0321] In some embodiments, a CAR with “BBZ” refers to a CAR with 4-1BB co-stimulatory molecules, typically comprising a CD8 hinge domain, a CD8 transmembrane (TM) domain, a 4-1BB costimulatory domain and CD3ζ domain.

[0322] In some embodiments, the CAR comprises a binding domain which can specifically bind to mesothelin (e.g., an antibody against mesothelin, such as an anti-mesothelin scFv), which can be called a CAR targeting mesothelin. In some embodiments, the CAR targeting mesothelin may be the CAR described in PCT/CN2022/112726 (which is incorporated herein by reference in its entirety). In some embodiments, the CAR targeting mesothelin may comprise any one of the anti-mesothelin antibodies as described above. In some embodiments, the CAR targeting mesothelin may comprise an amino acid sequence selected from SEQ ID Nos: 131-145.

[0323] In some embodiments, the CAR comprises a binding domain which can specifically bind to CD123 (e.g., an antibody against CD123, such as an anti-CD123 scFv), which can be called a CAR targeting CD123. In some embodiments, the CAR targeting CD123 may be the CAR described in PCT/CN2022/112724 (which is incorporated herein by reference in its entirety). In some embodiments, the CAR targeting CD123 may comprise any one of the anti-CD123 antibodies as described above. In some embodiments, the CAR targeting CD123 may comprise an amino acid sequence selected from SEQ ID Nos: 494-496.

[0324] In some embodiments, the CAR comprises a binding domain which can specifically bind to BCMA (e.g., an antibody against BCMA, such as an anti-BCM scFv), which can be called a CAR targeting BCMA. In some embodiments, the CAR targeting BCMA may be the CAR described in PCT/CN2022/112728 (which is incorporated herein by reference in its entirety). In some embodiments, the CAR targeting BCMA may comprise any one of the anti-BCMA antibodies as described above. In some embodiments, the CAR targeting BCMA may comprise an amino acid sequence selected from SEQ ID Nos: 249-260.

[0325] In some embodiments, the CAR comprises a binding domain which can specifically bind to CD19 (e.g., an antibody against CD19, such as an anti-CD19 scFv), which can be called a CAR targeting CD19. In some embodiments, the CAR targeting CD19 may be the CAR described in CN202210274255.1 (published as CN114349863A). In some embodiments, the CAR targeting CD19 may comprise any one of the anti-CD19 antibodies as described above. In some embodiments, the CAR targeting CD19 may comprise an amino acid sequence as set forth in SEQ ID No: 551.

[0326] In some embodiments, the CAR comprises a binding domain which can specifically bind to HER2 (e.g., an antibody against HER2, such as an anti-HER2 scFv), which can be called a CAR targeting HER2. In some embodiments, the CAR targeting HER2 may be the CAR described in CN202210750853.1 (published as CN114805584A, which is incorporated herein by reference in its entirety). In some embodiments, the CAR targeting HER2 may comprise any one of the anti-HER2 antibodies as described above. In some embodiments, the CAR targeting HER2 may comprise an amino acid sequence as set forth in SEQ ID No: 541.

[0327] In some embodiments, the CAR comprises a binding domain which can specifically bind to IL13Ra2 (e.g., an antibody against IL13Ra2, such as an anti-IL13Ra2 scFv), which can be called a CAR targeting IL13Ra2. In some embodiments, the CAR targeting IL13Ra2 may be the CAR described in CN202210743595.4 (published as CN114805581A, which is incorporated herein by reference in its entirety). In some embodiments, the CAR targeting IL13Ra2 may comprise any one of the anti-IL13Ra2 antibodies as described above. In some embodiments, the CAR targeting IL13Ra2 may comprise an amino acid sequence as set forth in SEQ ID No: 561.

[0328] In some embodiments, the CAR comprises a binding domain which can specifically bind to B7H3 (e.g., an antibody against B7H3, such as an anti B7H3 scFv), which can be called a CAR targeting B7H3. In some embodiments, the CAR targeting B7H3 may be the CAR described in CN202210714289.8 (published as CN114773477A, which is incorporated herein by reference in its entirety). In some embodiments, the CAR targeting B7H3 may comprise any one of the anti-B7H3 antibodies as described above. In some embodiments, the CAR targeting B7H3 may comprise an amino acid sequence as set forth in SEQ ID No: 571.

[0329] In some embodiments, the protein coding sequence may encode a fusion protein that are referred to as Lymphocytes-Antigen presenting cells Co-stimulators (“LACOSTIMs”, which is also called LACO or LACO-Stim herein), e.g., as described in PCT/CN2021/112742 and PCT/CN2022/112730 (which are incorporated herein by reference in their entirety). Fusion proteins provided herein comprise a first domain that activates an antigen-presenting cell (APC) and a second domain that activates an immune effector cell, wherein (i) the first domain comprises (a) a ligand that binds to an activation receptor of the APC, or a receptor-binding fragment thereof, or (b) an antibody that binds to an activation receptor of the APC, or an antigen-binding fragment thereof; and (ii) the second domain comprises (a) a co-stimulatory receptor of the immune effector cell, or a functional fragment thereof, (b) a co-stimulatory ligand of the immune effector cell, or a receptor-binding fragment thereof, or (c) an antibody that binds to a co-stimulatory receptor of the immune effector cell, or an antigen-binding fragment thereof.

[0330] In some embodiments, the APC is selected from the group consisting of a dendritic cell, a macrophage, a myeloid derived suppressor cell, a monocyte, a B cell, a T cell, and a Langerhans cell. In some embodiments, the activation receptor of the APC is selected from the group consisting of CD40, CD80, CD86, CD91, DEC-205 and DC-SIGN.

[0331] In some embodiments, the first domain of the fusion proteins provided herein comprises an antibody that binds to the activation receptor of the APC, or an antigen-binding fragment thereof. In some embodiments, the first domain of the fusion proteins provided herein is an anti-CD40 antibody or an antigen-binding fragment thereof. In some embodiments, the first domain is a monoclonal antibody. In some embodiments, the first domain is a chimeric, humanized, or human antibody. In some embodiments, the first domain is a Fab, Fab′, F(ab′)₂, Fv, scFv, (scFv)₂, single chain antibody, dual variable region antibody, diabody, nanobody, or single variable region antibody.

[0332] In some embodiments, the first domain of the fusion proteins provided herein is an anti-CD40 antibody or an antigen-binding fragment thereof. In some embodiments, the first domain of the fusion proteins provided herein is an anti-CD40 scFv. In some embodiments, the anti-CD40 antibody is any one anti-CD40 antibody listed herein. In some embodiments, the fusion protein comprises a first domain that activates an antigen-presenting cell (APC) and a second domain that activates an immune effector cell, wherein the immune effector cell is selected from the group consisting of a T cell, an NK cell, an NKT cell, a macrophage, a neutrophil, and a granulocyte. In some embodiments, the second domain of the fusion proteins provided herein comprises a cytoplasmic domain of the co-stimulatory receptor. In some embodiments, the co-stimulatory receptor is selected from the group consisting of CD28, 4-1BB, ICOS, CD27. OX40, DAP10, 2134, CD30, CD2, LIGHT, GITR, TLR, DR3, and CD43. In some embodiments, the co-stimulatory receptor is CD28. In some embodiments, the co-stimulatory receptor is 4-1BB. In some embodiments, the second domain further comprises the transmembrane domain of the co-stimulatory receptor.

[0333] In some embodiments, the second domain of the fusion proteins provided herein is a co-stimulatory ligand of the immune effector cell, or a receptor-binding fragment thereof. In some embodiments, the co-stimulatory ligand is selected from the group consisting of CD58, CD70, CD83, CD80, CD86, CD137L, CD252, CD275, CD54, CD49a, CD112, CD150, CD155, CD265, CD270, TL1A, CD127, IL-4R, GITR-L, TIM-4, CD153, CD48, CD160. CD200R, and CD44.

[0334] In some embodiments, the second domain of the fusion proteins provided herein is an antibody that binds to the co-stimulatory receptor, or an antigen-binding fragment thereof. In some embodiments, the co-stimulatory receptor is selected from the group consisting of CD28, 4-1BB, ICOS, CD27, OX40, DAP10, 2B4, CD30, CD2, LIGHT, GITR, TLR, DR3, and CD43. In some embodiments, the co-stimulatory receptor is CD28. In some embodiments, the co-stimulatory receptor is 4-1BB. In some embodiments, the second domain is a monoclonal antibody. In some embodiments, the second domain is a chimeric, humanized, or human antibody. In some embodiments, the second domain is a Fab, Fab′, F(ab′)₂, Fv, scFv, (scFv)₂, single chain antibody, dual variable region antibody, diabody, nanobody, or single variable region antibody.

[0335] In some embodiments, the second domain of the fusion proteins provided herein is an antibody that binds to (CD28, or an antigen-binding fragment thereof. In some embodiments.

[0336] In some embodiments, the fusion proteins provided herein, the N-terminus of the first domain is linked to the C-terminus of the second domain. In some embodiments, the N-terminus of the second domain is linked to the C-terminus of the first domain. In some embodiments, the first domain and the second domain of the fusion proteins provided herein are linked via a linker. In some embodiments, the linker is a trimerization motif. In some embodiments, the linker is a T4 fibritin trimerization motif.

[0337] In some embodiments of the fusion proteins provided herein, the first domain comprises CD40L or a receptor-binding fragment thereof, and the second domain comprises a CD28 cytoplasmic domain. In some embodiments, the first domain comprises a CD40L. In Some embodiments, the N-terminus of the first domain is linked to the C-terminus of the second domain.

[0338] In some embodiments of the fusion proteins provided herein, the first domain comprises CD40L or a receptor-binding fragment thereof, and the second domain comprises an anti-CD28 antibody or an antigen-binding fragment thereof. In some embodiments, the N-terminus of the first domain is linked to the C-terminus of the second domain. In some embodiments, the two domains are linked via a T4 fibritin trimerization motif.

[0339] In some embodiments of the fusion proteins provided herein, the first domain comprises an anti-CD40 antibody or an antigen-binding fragment thereof, and the second domain comprises an anti-CD28 antibody or an antigen-binding fragment thereof. In some embodiments, the N-terminus of the first domain is linked to the C-terminus of the second domain.

[0340] In some embodiments of the fusion proteins provided herein, the first domain comprises an anti-CD40 antibody or an antigen-binding fragment thereof, and the second domain comprises a CD28 transmembrane region and a CD28 cytoplasmic domain. In some embodiments, the first and second domains are linked via a CD8 hinge, a CD28 hinge, or an IgG Fc region. In some embodiments, the N-terminus of the second domain is linked to the C-terminus of the first domain.

[0341] In some embodiments, the LACOSTIM comprise a sequence selected from SEQ ID NO: 600, SEQ ID NO: 695-708, 801, 803, 813, 894-899.

[0342] In some embodiments, the protein coding sequence may encode a first protein and a second protein. The first protein may be an antibody, a chimeric antigen receptor (CAR) or a T cell receptor (TCR), and the second protein may be a LACOSTIM molecule described herein. The first protein and the second protein may be fused together as a fusion protein. The first protein may be linked to the N-terminus or the C-terminus of the second protein. The first protein and the second protein can be linked by a linker. The linker can be a self-cleaving linker, such as a 2A peptide (e.g., P2A, F2A, T2A etc.).

[0343] The term “polyA”, as used herein, is an abbreviation of polyadenylation and refers to a sequence comprising consecutive adenine nucleotides with a length of at least 30. The polyA sequence may be a ribonucleic acid sequence or a deoxyribonucleic acid sequence. The length of the consecutive adenine nucleotides in the polyA sequence may be at least 30 nucleotides, e.g., at least 45 nucleotides, at least 50 nucleotides, at least 55 nucleotides, at least 60 nucleotides, at least 65 nucleotides, at least 70 nucleotides, at least 75 nucleotides, at least 80 nucleotides, at least 85 nucleotides, at least 90 nucleotides, at least 95 nucleotides, at least 100 nucleotides, at least 105 nucleotides, at least 110 nucleotides, at least 115 nucleotides, at least 120 nucleotides, at least 125 nucleotides, at least 130 nucleotides, at least 135 nucleotides, at least 140 nucleotides, at least 145 nucleotides, at least 150 nucleotides, at least 155 nucleotides, at least 160 nucleotides, at least 165 nucleotides, at least 170 nucleotides, at least 175 nucleotides, at least 180 nucleotides, at least 185 nucleotides, at least 190 nucleotides, at least 195 nucleotides, at least 200 nucleotides, at least 205 nucleotides, at least 210 nucleotides, at least 215 nucleotides, at least 220 nucleotides, at least 225 nucleotides, at least 230 nucleotides, at least 235 nucleotides, at least 240 nucleotides. The length of the consecutive adenine nucleotides in the polyA sequence may be in a range of 30-240 nucleotides, such as 40-230 nucleotides, 45-220 nucleotides, 50-210 nucleotides, 60-200 nucleotides, 70-190 nucleotides, 80-180 nucleotides, 90-170 nucleotides, 100-160 nucleotides, 110-150 nucleotides, 120-140 nucleotides. In some embodiments, the polyA sequence may consist only of consecutive adenine nucleotides.

[0344] The circular RNA may be in the range of about 500 to about 10,000 nucleotides. In some embodiments, the circular RNA may be at least 500, 550, 600, 650, 700, 750, 800, 850, 900, 950, 1,000, 1,100, 1,200, 1,300, 1,400, 1,500, 1,600, 1,700, 1,800, 1,900, 2,000, 2,500, 3,000, 3,500, 4,000, 4,500 or 5,000 nucleotides in size. In some embodiments, the circular RNA is no more than 10,000, 9,000, 8,000, 7,000, 6,000, 5,000 or 4,000 nucleotides in size.

[0345] The circular RNA of the present invention is translatable, that is, it can be translated to a protein, e.g., in an in vitro system or in a cell. The cell may be a eukaryotic cell or a prokaryotic cell. In some embodiments, the circular RNA is a mRNA.

[0346] In some embodiments, the circular RNA of the present invention does not comprise a UTR, such as a 5′UTR and/or a 3′UTR.

[0347] The circular RNA may comprise additional elements which may not impede the translation of protein from the circular RNA. In some embodiments, the additional elements may facilitation the production of the circular RNA or the translation of the protein from the circular.

[0348] The circular RNA of the present invention may be prepared by general strategies for RNA circularization methods, such as chemical methods using cyanogen bromide or a similar condensing agent, enzymatic methods using RNA or DNA ligases, and ribozymatic methods using self-splicing introns (Petkovic, S. & Muller, S., “RNA circularization strategies in vivo and in vitro”, Nucleic Acids Research, 43(4): 2454-2465 (2015); Beadudry, D. & Perreault, J., “An efficient strategy for the synthesis of circular RNA molecules”, Nucleic Acids Research, 23(15): 3064-3066 (1995); Micura, R., “Cyclic Oligoribonucleotides (RNA) by Solid-Phase Synthesis”, Chemistry A European Journal, 5(7): 2077-2082 (1999)).

[0349] In some embodiments, the circular RNA of the present invention may be prepared by circularizing a precursor RNA molecule. The circularization of the precursor RNA molecule may be performed by a ribozymatic method using self-splicing introns.

[0350] The term “precursor RNA”, as used herein, refers to an RNA sequence that is circularized to form the circular RNA of the present invention.

[0351] The precursor RNA may be linear. The precursor RNA may comprise a circularization unit and at least one circularizing element. The term “circularization unit”, as used herein, refers to the sequence to be circularized and the sequence that will be comprised in the circular RNA by circularizing the precursor RNA. The term “circularizing element”, as used herein, refers to a nucleic acid sequence that can be manipulated or be spontaneously spliced and ligated under suitable conditions to circularize a nucleic acid sequence adjacent to the circularizing element.

[0352] The circularization unit comprises at least, in the following order, a IRES element, a protein coding sequence and a polyA, and optionally additional elements.

[0353] The circularizing element may be positioned on either side or both sides of the circularization unit.

[0354] In some embodiments, the circularizing element may comprise intron self-splicing sequences from Group I or Group II.

[0355] In some embodiments, the intron self-splicing sequences comprises a first intron sequence on the 5′ of the circularization unit and a second intron sequence on the 3′ of the circularization unit.

[0356] In some embodiments, the intron self-splicing sequences may be derived from Group I permuted intron-exon (PIE) sequences, wherein the first intron sequence may comprise a 3′ group I intron fragment and the second intron sequence may comprise a 5′ group I intron fragment. The group I permuted intron-exon (PIE) sequences may be derived from T4 bacteriophage gene td or Cyanobacterium anabaena sp. pre-tRNA-Leu gene. In one embodiment, the 3′ group I intron fragment and/or the 5′ group I intron fragment is from a Cyanobacterium anabaena sp. pre-tRNA-Leu gene or T4 phage Td gene.

[0357] In some embodiments, the 3′ group I intron fragment” has 75% or higher sequence identity (such as 80%, 85%, 90%, 95% or 100%) to the 3′ proximal end of a natural group I intron, including the splice site dinucleotide and optionally the adjacent exon sequence. The adjacent exon sequence may have at least 1 nucleotide in length (e.g., at least 5 nucleotides in length, at least 10 nucleotides in length, at least 15 nucleotides in length, at least 20 nucleotides in length, at least 25 nucleotides in length, or at least 30 nucleotides in length). In some embodiments, the 3′ group I intron fragment is as set forth in SEQ ID NO: 588.

[0358] In some embodiments, the “5′ group I intron fragment” has 75% or higher sequence identity (such as 80%, 85%, 90%, 95% or 100%) to the 3′ proximal end of a natural group I intron, including the splice site dinucleotide and optionally the adjacent exon sequence. The adjacent exon sequence may have at least 1 nucleotide in length (e.g., at least 5 nucleotides in length, at least 10 nucleotides in length, at least 15 nucleotides in length, at least 20 nucleotides in length, at least 25 nucleotides in length, or at least 30 nucleotides in length). In some embodiments, the 5′ group I intron fragment is as set forth in SEQ ID NO: 592.

[0359] The term “splice site”, as used herein, refers to a dinucleotide that is included in a group I intron and between which a phosphodiester bond is cleaved during RNA circularization.

[0360] During the circularization of the precursor RNA comprising Group I intron self-splicing sequences, the precursor RNA undergoes the double trans esterification reactions characteristic of group I catalytic introns. Firstly, 3′ OH of a free guanine nucleoside (or one located in the intron) or a nucleotide cofactor (GMP, GDP, GTP) attacks phosphate at the splice site in the 5′ group I intron fragment and results in a break. Then the 3′OH of the break attacks phosphate at the splice site in the 3′ group I intron fragment and triggers the second transesterification, thereby joining the circularization unit together.

[0361] The precursor RNA may further comprise additional elements, such as elements that can facilitate the circularization of the precursor RNA and/or the translation of the protein coding region, such as spacers and/or homology arms.

[0362] The term “spacer”, as used herein, refers to any contiguous nucleotide sequence separating two other elements along a polynucleotide sequence. The spacer is predicted to or can avoid interfering with the structure of the proximal structures, for example, from the IRES, the protein coding region, the polyA or the circularizing element. The spacer sequences may be used to allow these structures to fold independently and correctly, and promote the circularization of the precursor RNA. The spacer may be located adjacent to the circularizing element, the IRES, the protein coding region and/or the polyA. For example, the spacer may be located downstream of and adjacent to the first intron sequence and/or upstream of and adjacent to the second intron sequence. A spacer is typically non-coding.

[0363] The precursor RNA may further comprise one or more, such as two spacers. In some embodiments, the precursor RNA may comprise a 5′ spacer sequence between the first intron sequence and the internal ribosome entry site (IRES) sequence, and/or a 3′ spacer sequence between the polyA and the second intron sequence.

[0364] The 5′ spacer sequence may be at least 10 nucleotides in length. In some embodiments, the 5′spacer sequence is at least 10, 11, 12, 13, 14, 15, 16, 17, 18, 19, 20, 25 or 30 nucleotides in length. In some embodiments, the 5′ spacer sequence is no more than 100, 90, 80, 70, 60, 50, 45, 40, 35 or 30 nucleotides in length. In some embodiments the 5′spacer sequence is between 20 and 50 nucleotides in length. In some embodiments, the 5′spacer sequence is 10, 11, 12, 13, 14, 15, 16, 17, 18, 19, 20, 21, 22, 23, 24, 25, 26, 27, 28, 29, 30, 31, 32, 33, 34, 35, 36, 37, 38, 39, 40, 41, 42, 43, 44, 45, 46, 47, 48, 49 or 50 nucleotides in length. In some embodiments, the 5′ spacer sequence contains less than 30 consecutive adenosines. In some embodiments, the 5′ spacer is as set forth in SEQ ID NO: 589.

[0365] The 3′ spacer sequence may be at least 10 nucleotides in length. In some embodiments, the 3′spacer sequence is at least 10, 11, 12, 13, 14, 15, 16, 17, 18, 19, 20, 25 or 30 nucleotides in length. In some embodiments, the 3′spacer sequence is no more than 100, 90, 80, 70, 60, 50, 45, 40, 35 or 30 nucleotides in length. In some embodiments the 3′spacer sequence is between 20 and 50 nucleotides in length. In some embodiments, the 3′spacer sequence is 10, 11, 12, 13, 14, 15, 16, 17, 18, 19, 20, 21, 22, 23, 24, 25, 26, 27, 28, 29, 30, 31, 32, 33, 34, 35, 36, 37, 38, 39, 40, 41, 42, 43, 44, 45, 46, 47, 48, 49 or 50 nucleotides in length. In some embodiments, the 3′ spacer sequence contains less than 30 consecutive adenosines. In some embodiments, the 3′ spacer is as set forth in SEQ ID NO: 591.

[0366] Homology arms are generally used in pairs, and generally located external to the first intron sequence (i.e., on its 5′) and the second intron sequence (i.e., on its 3′). In some embodiments, the precursor RNA may comprise a 5′ homology arm on the 5′ of the first intron sequence and a 3′ homology arm on the 3′ of the second intron sequence.

[0367] The term “homology arm”, as used herein, refers to any contiguous sequence that is used to form base pairs with at least about 75% (e.g., at least about 80%, at least about 85%, at least about 90%, at least about 95%, about 100%) of another sequence in the RNA, such as another homology arm. The homology arm is generally located adjacent to the circularizing element, and can bring the first intron sequence and second intron sequence in close spatial proximity through base pairing, thereby facilitating the splicing of the introns and promoting the circularization or the precursor RNA. The homology arm generally tends not to form base pairs with unintended sequences in the RNA (e.g., sequences other than the homology arm). The homology arm may have less than 50% (e.g., less than 45%, less than 40%, less than 35%, less than 30%, less than 25%, less than 20%, less than 15%, less than 10% or less than 5%) sequence identity with the unintended sequences in the RNA.

[0368] The 5′ homology arm may be about 5-50 nucleotides in length. In some embodiments, the 5′ homology arm may be about 20-40 nucleotides in length. In some embodiments, the 5′ homology arm is at least 15, 16, 17, 18, 19, 20, 21, 22, 23, 24 or 25 nucleotides in length. In some embodiments, the 5′ homology arm is no more than 50, 45, 40, 39, 38, 37, 36, 35, 34, 33, 32, 31 or 30 nucleotides in length. In some embodiments, the 5′ homology arm is 20, 21, 22, 23, 24, 25, 26, 27, 28, 29, 30, 31, 32, 33, 34, 35, 36, 37, 38, 39 or 40 nucleotides in length. In some embodiments, the 5′ homology arm is as set forth in SEQ ID NO: 587.

[0369] The 3′ homology arm may be about 5-50 nucleotides in length. In some embodiments, the 3′ homology arm may be about 20-40 nucleotides in length. In some embodiments, the 3′ homology arm is at least 15, 16, 17, 18, 19, 20, 21, 22, 23, 24 or 25 nucleotides in length. In some embodiments, the 3′ homology arm is no more than 50, 45, 40, 39, 38, 37, 36, 35, 34, 33, 32, 31 or 30 nucleotides in length. In some embodiments, the 3′ homology arm is 20, 21, 22, 23, 24, 25, 26, 27, 28, 29, 30, 31, 32, 33, 34, 35, 36, 37, 38, 39 or 40 nucleotides in length. In some embodiments, the 3′ homology arm is as set forth in SEQ ID NO: 593.

[0370] In some embodiments, one or more elements in the precursor RNA or the circular RNA have a sequence identity of at least 75% (e.g., at least 80%, at least 85%, at least 90%, at least 95% or 100%) with natural sequences, including e.g., the IRES and the intron fragment. In some embodiments, the protein coding sequence is not naturally occurring nucleotide sequence. In some embodiments, the protein coding region encodes a natural or a synthetic protein.

[0371] The precursor RNA may be circularized under suitable conditions, which depend on the specific circularizing strategy and are known to those skilled in the art. For example, The condition for circularizing a precursor RNA comprising Group I intron self-splicing sequences may be in the presence of magnesium ions and quanosine nucleotide or nucleoside and under a temperature at which RNA circularization occurs (e.g., between about 20° C. and about 60° C.).

[0372] The circularization of the precursor RNA may be performed in vitro. Alternatively, the circularization of the precursor RNA may be performed in a cell, wherein the precursor RNA may be introduced into a cell or a DNA template for the precursor RNA may be introduced into a cell to be transcribed to the precursor RNA, then the precursor RNA is circularized in the cell.

[0373] The precursor RNA of the present invention may be artificially synthesized or be obtained by transcription from a DNA template.

[0374] The DNA template may be comprised in a vector.

[0375] The vector of the present invention may be an expression vector, The term “expression vector” refers to a vector designed to enable the expression of an inserted nucleic acid sequence.

[0376] Vectors may be introduced into the desired host cells by methods known in the art, e.g., transfection, electroporation, microinjection, transduction, cell fusion, DEAE dextran, calcium phosphate precipitation, lipofection (lysosome fusion), use of a gene gun, or a DNA vector transporter (see, e.g., Wu et al., J. Biol. Chem. 267:963 (1992); Wu et al., J. Biol. Chem. 263:14621 (1988); and Hartmut et al., Canadian Patent Application No. 2,012,311).

[0377] The vector of the present invention may be a DNA construct, such as a plasmid, or a viral vector.

[0378] The vector of the present invention comprises a transcription unit, which is a polynucleotide sequence that can be transcribed to the precursor RNA. The vector may further comprise a promoter that initiate the transcription of the transcription unit. The promoter may be located upstream of and adjacent to the transcription unit. The promoter may be an RNA polymerase promoter. Examples of the RNA polymerase promoter include, but are not limited to a T7 RNA polymerase promoter, T6 RNA polymerase promoter, SP6 RNA polymerase promoter, T3 RNA polymerase promoter, or T4 RNA polymerase promoter.

[0379] The elements in the circular RNA, the precursor RNA or the vector of the present invention are operably linked to each other.

[0380] In some embodiments, the present invention relates to a method of producing a circular RNA, the method comprising generating precursor RNA by performing transcription using the vector provided herein as a template, and circularizing the precursor RNA to obtain the circular RNA.

[0381] The transcription step may be performed in vitro (i.e., in a cell-free system) or in a cell. The circularization step may be performed in vitro or in a cell. In vitro transcription methods are known to the skilled person. For example, there are a number of commercially available in vitro transcription kits.

[0382] In some embodiments, artificially synthesized precursor RNA is introduced into a host cell, and the precursor RNA is circularized in the cell to obtain the circular RNA. In some embodiments, the vector provided herein is introduced into a host cell and is transcribed in the cell to the precursor RNA, and the precursor RNA is circularized in the cell to obtain the circular RNA.

[0383] The circular RNA of the present invention may be purified by a variety of methods, such as a size-exclusion column. In preferred embodiments, the poly A comprised in the circular allows for purification by oligo dT-based capturing, such as by oligo dT beads or oligo dT resin, such as oligo dT affinity chromatography.

[0384] The term “oligo-dT”, as used herein, refers to a homopolymer consisting exclusively of thymidines. Oligo dT beads refers to magnetic beads that is conjugated to Oligo dT. Oligo dT resin refers to resin (such as Sepharose resin) that is covalently conjugated to Oligo dT.

[0385] In some embodiments, the present invention relates to a method of purifying a circular RNA, the method comprising producing the circular RNA provided herein, and purifying the circular RNA through oligo dT-based capturing.

[0386] In some embodiments, the present invention relates to a method of expressing a protein in a cell. Said method may comprise introducing the circular RNA, the vector or the precursor RNA provided herein into a host cell and expressing the protein encoded by the protein coding sequence in the circular RNA.

[0387] The circular RNA, the vector or the precursor RNA may be introduced into the host cell by methods known in the art, e.g., electroporation, microinjection, transduction, cell fusion, DEAE dextran, calcium phosphate precipitation, lipofection (lysosome fusion), or use of a gene gun.

[0388] In some embodiments, in order to express protein in a cell, the circular RNA may be introduced into the cell using, for example, lipofection or electroporation. In some embodiments, the circular RNA may be introduced into a cell using a nanocarrier which can be, for example, a lipid, a polymer or a lipo-polymeric hybrid, such as a lipid nanoparticle (LNP).

[0389] The host cell may be a prokaryotic or a eukaryotic cell. In some embodiments, the host cell may be a mammal cell, preferably a human cell, such as a T cell, a NK cell or a A549 cell.

[0390] The protein expressed from the circular RNA may be further purified. Methods for purifying a protein are well known to those skilled in the art.

[0391] In some embodiments, the present invention relates to a method of producing a protein, the method comprising expressing the protein from the circular RNA provided herein, and purifying the protein. The circular RNA may be produced by any method provided herein.

[0392] In some embodiments, the present invention relates to a cell or a cell population comprising the circular RNA, the precursor RNA or the vector provided herein. The cell may be a mammal cell, preferably a human cell, more preferably a T cell or a NK cell.

[0393] The circular RNA, the precursor RNA, the vector, the cell or the cell population can be used to express a protein of interest, produce a protein of interest or treat a disease via the expressed therapeutic protein. The circular RNA, the precursor RNA, the vector, the cell or the cell population can also be used as a vaccine.

[0394] The cell or a cell population may be an immune effector cell, such as a T cell, a NK cell, an NKT cell, a macrophage, a neutrophil, or a granulocyte cell, or a population comprising these cells. In some embodiments, the T cell is a cytotoxic T cell, a helper T cell, a gamma delta T, a CD4+/CD8+ double positive T cell, a CD4+ T cell, a CD8+ T cell, a CD4/CD8 double negative T cell, a CD3+ T cell, a naive T cell, an effector T cell, a helper T cell, a memory T cell, a regulator T cell, a Th0 cell, a Th1 cell, a Th2 cell, a Th3 (Treg) cell, a Th9 cell, a Th17 cell, a Thαβ helper cell, a Tfh cell, a stem memory TSCM cell, a central memory TCM cell, an effector memory TEM cell, or an effector memory TEMRA cell.

[0395] In some embodiments, the present invention provides to a cell or a cell population comprising a first polynucleotide encoding a CAR and a second polynucleotide encoding a fusion protein comprising a first domain that activates an antigen-presenting cell (APC) and a second domain that activates an immune effector cell, wherein the first polynucleotide and the second polynucleotide are located on same or different circular RNAs in the cell, wherein (i) the first domain comprises (a) a ligand that binds to an activation receptor of the APC, or a receptor-binding fragment thereof, or (b) an antibody that binds to an activation receptor of the APC, or an antigen-binding fragment thereof; and (ii) the second domain comprises (a) a co-stimulatory receptor of the immune effector cell, or a functional fragment thereof, (b) a co-stimulatory ligand of the immune effector cell, or a receptor-binding fragment thereof, or (c) an antibody that binds to a co-stimulatory receptor of the immune effector cell, or an antigen-binding fragment thereof.

[0396] The first polynucleotide and the second polynucleotide function as protein coding sequences in the circular RNA. The first polynucleotide may encode the first protein described in the present invention. The second polynucleotide may encode the second protein described in the present invention.

[0397] When the first polynucleotide and the second polynucleotide are located on same circular RNA, the first polynucleotide may be positioned in the 5′ end or the 3′ end of the second polynucleotide. The first polynucleotide and the second polynucleotide can be linked by a nucleotide sequence encoding a linker. The linker can be a self-cleaving linker, such as a 2A peptide (e.g., P2A, F2A, T2A etc.).

[0398] The CAR encoded by the first polynucleotide may be any CAR described herein. The fusion protein encoded by the second polynucleotide may be any fusion protein in the context of LACOSTIM described herein.

[0399] The present invention also relates to a composition, e.g., a pharmaceutical composition, which comprises the circular RNA, the precursor RNA, the vector or the cell provided herein and optionally a carrier. The carrier may be a delivery carrier or a pharmaceutical acceptable carrier (such as a pharmaceutical acceptable delivery carrier). The pharmaceutical composition may be a vaccine composition. The vaccine composition may comprise the circular RNA, the precursor RNA, the vector, the cell or the cell population, and an adjuvant (e.g., aluminum hydroxide, BCG, etc.).

[0400] The pharmaceutical composition of the present invention may be formulated for a variety of means of administration in accordance with known techniques. See, for example, Remington, The Science and Practice of Pharmacy (9th Ed. 1995). In the manufacture of a pharmaceutical composition, the active agent is typically admixed with, inter alia, a pharmaceutical acceptable carrier. The pharmaceutical acceptable carrier must, of course, be acceptable in the sense of being compatible with any other ingredients in the formulation and must not be deleterious to the subject. A pharmaceutically acceptable carrier may include, but is not limited to, a buffer, an excipient, a stabilizer, a preservative, a wetting agent, a surfactant, an emulsifying agent, or combinations thereof. Examples of a buffer include, but is not limited to acetic acid, citric acid, histidine, boric acid, formic acid, succinic acid, phosphoric acid, carbonic acid, malic acid, aspartic acid, Tris buffer, HEPPSO, HEPES, neutral buffered saline, phosphate buffered saline and the like.

[0401] The term “delivery carrier”, as used herein, refers to a carrier for delivering a DNA or RNA molecular to a target cell or a target tissue where the protein of interest is expressed. Examples of the delivery carrier include, but are not limited to, lipid nanoparticles or polymers.

[0402] The present invention also relates to a composition, e.g., a pharmaceutical composition, which comprises a cell that comprises the circRNA of the present invention. The cell may be an immunologic effector cell, such as a T cell, a NK cell, an NKT cell, a macrophage, a neutrophil, or a granulocyte cell.

[0403] The pharmaceutical composition of the present invention can be used to treat or prevent a disease, e.g., tumor, cancer, a virus infection or an autoimmune disease, in a subject. In some embodiments, the cancer is a solid tumor or a hematological cancer (such as leukemia). In some embodiments, the cancer is acute myeloid leukemia (AML), B-acute lymphoid leukemia (B-ALL), T-acute lymphoid leukemia (T-ALL), B cell precursor acute lymphoblastic leukemia (BCP-ALL) or blastic plasmacytoid dendritic cell neoplasm (BPDCN). In some embodiments, the disease (such as cancer) is characterized in that the disease cell expresses mesothelin, CD123, BCMA, HER2, IL13Ra2, B7H3. In some embodiments, the cancer is CD123-expressing cancer. In some embodiments, the cancer is CD123-expressing AML. In some embodiments, the cancer is mesothelioma. In some embodiments, the mesothelioma is pleural mesothelioma, peritoneal mesothelioma, or pericardial mesothelioma. In some embodiments, the cancer is pancreatic cancer. In some embodiments, the pancreatic cancer is pancreatic ductal carcinoma. In some embodiments, the cancer is ovarian cancer. In some embodiments, the cancer is ovarian epithelial carcinoma. In some embodiments, the cancer is a lung cancer. In some embodiments, the cancer is non-Hodgkin's lymphoma, chronic lymphocytic leukemia, acute lymphocytic leukemia, human B-cell precursor leukemia, multiple myeloma, malignant lymphoma. In some embodiments, the cancer is breast cancer, stomach cancer, ovarian cancer, cervical cancer, uroepithelial cancer, esophageal cancer, bladder cancer, colorectal cancer, endometrial cancer, kidney cancer, lung cancer, pancreatic cancer, head and neck cancer, sarcoma, glioblastoma, prostate cancer, or thyroid cancer. In some embodiments, the cancer is a glioma or a head and neck cancer.

[0404] The present invention also relates to a method of treating a disease, the method comprising administering a therapeutically effective amount of a composition provided herein to a subject in need thereof. In some embodiments, the subject is a human.

[0405] The disease may be a tumor, cancer, a virus infection or an autoimmune disease. The disease may involve loss or absence of a functional protein which is encoded by the protein coding sequence in the circular RNA or high expression of a protein. In some embodiments, the disease may be a tumor with high expression of mesothelin, such as mesothelioma, pancreatic adenocarcinoma, ovarian cancer and/or lung adenocarcinoma. “High expression” means that the expression level of a tumor antigen or a tumor surface receptor on said tumor cell is higher than that on normal cells, e.g., 10%, 20%, 30%, 40%, 50%, 60%, 70%, 80%, 90% or more higher than that on normal cell.

[0406] The pharmaceutical composition of the present invention may be administered in any manner suitable to the disease to be treated (or prevented) and the subject. In certain embodiments, the administration manner may include, but is not limited to, parenteral or non-parenteral route, including oral, sublingual, buccal, percutaneous, rectal, vaginal, intradermal, intranasal route or parenteral route such as intravenous (i.v.), intraperitoneal, intradermal, subcutaneous, intramuscular, intracranial, intrathecal, intratumoral, transdermal, transmucosal intraarticular, intra-synovial, intrasternal, intrathecal, intrahepatic, intralesional or intracranial injection or infusion. The pharmaceutical compositions may be injected, for instance, directly into a tumor, lymph node, tissue, organ, or site of infection.

[0407] Dosage forms suitable for oral administration include, but are not limited to, tablet, capsule, powder, pill, granule, suspension, solution or preconcentrate of solution, emulsion or preconcentrates of emulsion. Pharmaceutical acceptable carriers that can be used in an oral dosage form include water, glycols, oils, alcohols, flavoring agents, preservatives, coloring agents and the like. Carriers such as starches, sugars, microcrystalline cellulose, diluents, filler, glidants, granulating agents, lubricants, binders, stabilizers, disintegrating agents and the like can be used to prepare an oral solid preparation such as powder, capsule or tablet.

[0408] Dosage forms suitable for parenteral administration include, but are not limited to, sterile liquid preparations, e.g., isotonic aqueous solutions, emulsions, suspensions, dispersions, or viscous compositions, which may be buffered to a desirable pH. Parenteral dosage forms may be ready for use or dry products ready to be dissolved or suspended in a pharmaceutically acceptable carrier. Parenteral dosage forms may be formulated sterile or are capable of being sterilized prior to administration to a subject. Pharmaceutical acceptable carriers that can be used to provide parenteral dosage forms include, but are not limited to, water for injection; aqueous vehicles such as, but not limited to, sodium chloride injection, Ringer's injection, dextrose injection; water-miscible carriers such as, but not limited to, ethyl alcohol, polyethylene glycol, and polypropylene glycol; non-aqueous carriers such as, but not limited to, corn oil, cottonseed oil, peanut oil, sesame oil, ethyl oleate, isopropyl myristate, and benzyl benzoate; and solubilizing agent such as cyclodextrin.

[0409] The quantity and frequency of administration will be determined by such factors as the condition of the subject (e.g., age, body weight, sex, and response of the subject to the medicament), and the type and severity of the subject's disease, although appropriate dosages may be determined by clinical trials.

[0410] The pharmaceutical composition may be administered to a subject in a therapeutically effective amount of about 0.5 to about 250 mg/kg, e.g., about 1 to about 250 mg/kg, about 2 to about 200 mg/kg, about 3 to about 120 mg/kg, about 5 to about 250 mg/kg, about 10 to about 200 mg/kg, or about 20 to about 120 mg/kg.

[0411] The pharmaceutical composition may be administered once or twice one day; or once every 2, 3, 4, 5, 6, 7, 8, 9 or 10 days, once every 1, 2, 3, 4, 5, or 6 weeks or once every 1, 2, 3, 4, 5, or 6 months or longer. The pharmaceutical composition may also be administered in a several times (e.g., 1, 2, 3, 4 or 5 times) weekly or a several times (e.g., 1, 2, 3, 4, 5, 6, 7, 8, 9 or 10 times) monthly scheme. for example, in a five times weekly scheme, the pharmaceutical composition may be administered once daily for five consecutive days followed by two consecutive days off.

[0412] The circular RNA, the precursor RNA or the vector can be used to improve protein expression level. Therefore, the present invention also relates to a method of improving protein expression level of a circular RNA, the method comprising inserting a polyA in the circular RNA. The polyA is defined as described above. The circular RNA comprising the inserted polyA sequence has higher protein expression level compared with circular RNA counterpart without the polyA sequence (i.e., a circular RNA does not comprise the polyA sequence as describe herein).

### EXAMPLES

### Example 1

### Methods

1. In Vitro Transcription (IVT) of Anti-MSLN M12 CAR Linear mRNA
[0413] 1.1 Linearize the pDA-M12.BBZ CAR plasmid (FIG. 10) by digestion with BspQ1 enzyme.
[0414] 1.2 Purify the linearized vector by PCR Cleanup kit (Qiagen), and elute with RNase-free water.
[0415] 1.3 The concentration of DNA is measured by nanodrop, and checked by running agarose DNA gel.
[0416] 1.4 IVT is performed following the manufacturer' protocol (Thermofisher, Cat No: AMB13455). Briefly, 1 μg template DNA, NTP/ARCA buffer, T7 buffer, GTP, T7 enzyme and RNase free H₂O were added in 20 μl volume to 0.2 ml PCR tube, and incubate at 37° C. for 4 hours.
[0417] 1.5 4 hours later, add 2 μl of DNase I per reaction, and incubate at 37° C. for 15 min.
[0418] 1.6 Then perform tailing procedure according to the manufacturer's suggestion.
[0419] 1.7 Purify the IVT mRNA using the RNasy kit (Qiagen).
[0420] 1.8 The concentration of RNA is measured by nanodrop, and checked by running PAGE gel.
   2. In Vitro Transcription (IVT) of Anti-MSLN M12 CAR circRNA
[0421] 2.1 Linearize the pCA-M12.BBZ, pCA45-M12.BBZ, pCA70-M12.BBZ CAR plasmid (FIG. 11-13) by digestion with BspQ1 enzyme.
[0422] 2.2 Purify the linearized vector by PCR Cleanup kit (Qiagen), and elute with RNase-free water.
[0423] 2.3 The concentration of DNA is measured by nanodrop, and checked by running agarose DNA gel.
[0424] 2.4 IVT is performed following the manufacturer's protocol (Thermofisher, Cat No: AMB13345). Briefly, 1 μg template DNA, NTP mixture, T7 buffer, GTP, T7 enzyme and RNase free H₂O were added in 20 μl volume to 0.2 ml PCR tube, and incubate at 37° C. for 4 hours.
[0425] 2.5 4 hours later, add 2 μl of DNase I per reaction, and incubate at 37° C. for 15 min.
[0426] 2.6 After DNase treatment additional GTP was added to a final concentration of 2 mM, and then reactions were heated at 55° C. for 15 min.
[0427] 2.7 circRNA was then purified by column or AKTA system.
[0428] 2.8 The concentration of RNA is measured by nanodrop, and checked by running PAGE gel.
   3. Purify circRNA by CIMmultus Oligo dT Column
[0429] 3.1 Buffer preparation: Buffer A: Equilibration/wash buffer. 50 mM sodium phosphate, 250 mM sodium chloride, 5 mM EDTA, pH 7.0; Buffer B. Second wash buffer. 50 mM sodium phosphate, 5 mM EDTA, pH 7.0; Buffer C. Elution buffer. 10 mM Tris, pH 8.0; Buffer D. Cleaning buffer. 3 M Guanidine-HCl, 5 mM EDTA, pH 7.0.
[0430] 3.2 Equilibrate column with buffer A: Pump equilibration buffer (A) through the CIMmultus Oligo dT column until output pH and conductivity are the same as the input buffer. Flow rate: 5 column volumes per minute (CV/min).
[0431] 3.3 Inject sample. Perform sample injection according to the manufacturer's suggestions.
[0432] 3.4 Wash1 with buffer A: 10 CV of equilibration buffer.
[0433] 3.5 Wash2 with buffer B: 10 CV second wash buffer.
[0434] 3.6 Elute with buffer C: elute and collect circRNA sample, until UV absorbance returns to baseline.
[0435] 3.7 Clean with buffer D. clean and wash the column system with at least 10 CV of cleaning buffer.

### 4. Electroporation of RNA to A549-GFP and T Cells

[0436] 4.1 Collect A549-GFP tumor cells and T cells and wash with Opti-MEM medium for 3 times.
[0437] 4.2 Resuspend cell pellet with Opti-MEM medium, adjust the cell concentration to 1×10e7/ml.
[0438] 4.3 Aliquot 5 μg MSLN mRNA to 1.5 ml EP tube, then add 100 μl A549 cells, mix well. For T cells electroporation, Aliquot 10 μg M12.BBZ mRNA or circRNA to 1.5 ml EP tube, then add 100 μl A549 cells, mix well.
[0439] 4.4 Set up parameters on BTX machine:
[0440] a) for T cell: 500 voltage, 0.7 ms
[0441] b) for A549 tumor cell: 300 voltage, 0.5 ms;
[0442] 4.5 Add 100 μl cells mixed with RNA in the BTX electroporation cup, tap to avoid bubble.
[0443] 4.6 Perform electroporation, then transfer cells to the pre-warmed culture medium and culture at 37° C.

### 5. In Vitro Cytotoxicity Assay of Anti-MSLN M12 CAR-T Cells

[0444] 5.1 12 hours before coculture, seed A549-EGFP cells that electroporated with 5 μg MSLN mRNA to flat-bottomed 96-well plate with 3000 cells/100 μl/well.
[0445] 5.2 About 12 to 24 hours post electroporation, count and dilute CAR-T cells to appropriate concentration, seed cells with 100 ul/well to tumor cells with different E/T ratios, such as 3:1 and 1:1.
[0446] 5.3 Put the co-culture plate into IncuCyte S3 machine, and setup scanning parameters.
[0447] 5.4 After 4 days scanning, the Total Green Object Integrated Intensity (GCU×μm²/Well) was analyzed to calculate the killing efficiency.
   The Elements Used in this Example:
[0448] T7 promoter: SEQ ID NO: 586.
[0449] M12: anti-mesothelin (anti-MSLN) scFv.
[0450] M12.BBZ: a chimeric antigen receptor (CAR) comprising M12, CD8 hinge domain, CD8 transmembrane (TM) domain, 4-1BB costimulatory domain and CD3ζ domain, as shown in SEQ ID NO: 572.
[0451] 3′UTR: SEQ ID NO: 597
[0452] HA-1: Homology arm-1, as shown in SEQ ID NO: 587.
[0453] Intron-1: Anabaena intron-1, as shown in SEQ ID NO: 588.
[0454] Spacer-1: SEQ ID NO: 589.
[0455] IRES: CVB3 IRES, as shown in SEQ ID NO: 590.
[0456] Spacer-2: SEQ ID NO: 591.
[0457] Intron-2: Anabaena intron-2, as shown in SEQ ID NO: 592.
[0458] HA-2: homology arm-2, as shown in SEQ ID NO: 593.

### Results

[0459] First, we construct circRNA vector with no polyA, poly 45A and poly 70A (FIG. 1), and perform IVT using these vectors. Then, we test whether circRNA with 45A and 70A can be purified by oligo dT resin, which is commonly used in linear mRNA purification. Results showed that circRNA with 45A and 70A can be successfully purified by oligo dT resin with high purity (FIG. 2-5). Moreover, the yield of circRNA-70A is higher than circRNA-45A (FIG. 6). To test the function of circRNA with poly A sequence, we transduce the same amount of M12.BBZ linear mRNA, circRNA with no polyA and poly 70A into activated T cells. We test the expression level of each RNA by flow cytometry staining of the M12 CAR with mesothelin-Fc recombinant protein in 24 hours (FIG. 7) and 48 hours (FIG. 8) post transduction, results showed that the higher expression level of M12 CAR in the circRNA-70A group than linear mRNA group and circRNA-45A group. Coculture assay using these CAR-T cells with mesothelin expressing tumor cells also demonstrated the higher killing ability of the circRNA-70A CAR-T group than linear mRNA CAR-T group and circRNA CAR-T group (FIG. 9).

### Sequences Used in Example 1

Anti-MSLN M12.BBZ CAR amino acid sequence (SEQ ID NO: 572):
(wherein the underlined amino acid sequences are, in their orders, LCDR1, LCDR2, LCDR3,
HCDR1, HCDR2, HCDR3, respectively; the italic amino acid sequence
(GGGGSGGGGSGGGGS) is a linker between VL and VH of anti-MSLN scFv; the underlined
and italic amino acid sequence is CD8 signal peptide)
MALPVTALLLPLALLLHAARPAIRLTQSPSLLSASVGDRVTVTCRASQGGGNYLAWYQQK
PGKAPKLLIYGASKLQSGVPSRFSGSGSGTEFTLTISSLQPEDFATYYCQQLNSYPVTFGQ
GTKVDIKGGGGSGGGGSGGGGSEVQLVESGAEVKKPGASVKVSCKASGYTFTTYYIHW
VRQAPGQGLEWMGIINPSSGSTTYTQKFQGRVTMTRDTSTSTVYIELSGLRSEDTAVYY
CARGETLRGYFDYWGQGTLVTVSSTTTPAPRPPTPAPTIASQPLSLRPEACRPAAGGAVH
TRGLDFACDIYIWAPLAGTCGVLLLSLVITLYCKRGRKKLLYIFKQPFMRPVQTTQEEDG
CSCRFPEEEEGGCELRVKFSRSADAPAYKQGQNQLYNELNLGRREEYDVLDKRRGRDP
EMGGKPRRKNPQEGLYNELQKDKMAEAYSEIGMKGERRRGKGHDGLYQGLSTATKDT
YDALHMQALPPR
Anti-MSLN M12.BBZ CAR nucleotide sequence (SEQ ID NO: 573):
atggccttaccagtgaccgccttgctcctgccgctggccttgctgctccacgccgccaggccggccatccggttgacccagtctccatccct
cctgtctgcatctgtaggagacagggtcaccgtcacttgtcgggccagtcagggcggtggcaattatttagcctggtatcagcaaaaaccag
ggaaagccccgaaactcctgatctatggtgcatccaagttgcaaagtggggtcccatcgaggttcagcggcagtggatctgggacagaatt
cactctcacaatcagcagtctgcagcctgaagattttgcaacttattactgtcaacagcttaatagttaccctgtcacttttggccaggggacca
aagtggatatcaaaggtggtggtggttctggcggcggcggctccggaggtggtggatccgaggtgcagctggtggagtctggggctgag
gtgaagaagcctggggcctcagtgaaggtttcctgcaaggcatctggatacaccttcaccacctactatatacactgggtgcgacaggccc
ctggacaagggcttgagtggatgggaataatcaaccctagtagtggtagcactacctacacacagaagttccagggcagagtcaccatgac
cagggacacgtccacgagcacagtctacattgaactgagcggcctgagatctgaagacacggccgtgtattactgtgcccgaggggaga
cgcttcggggctactttgactactggggccagggaaccctggtcaccgtctcttcaaccacgacgccagcgccgcgaccaccaacaccgg
cgcccaccatcgcgtcgcagcccctgtccctgcgcccagaggcgtgccggccagcggcggggggcgcagtgcacacgagggggctg
gacttcgcctgtgatatctacatctgggcgcccttggccgggacttgtggggtccttctcctgtcactggttatcaccctttactgcaaacgggg
cagaaagaaactcctgtatatattcaaacaaccatttatgagaccagtacaaactactcaagaggaagatggctgtagctgccgatttccaga
agaagaagaaggaggatgtgaactgagagtgaagttcagcaggagcgcagacgcccccgcgtacaagcagggccagaaccagctcta
taacgagctcaatctaggacgaagagaggagtacgacgttttggacaagagacgtggccgggaccctgagatggggggaaagccgaga
aggaagaaccctcaggaaggcctgtacaatgaactgcagaaagataagatggcggaggcctacagtgagattgggatgaaaggcgagc
gccggaggggcaaggggcacgatggcctttaccagggtctcagtacagccaccaaggacacctacgacgcccttcacatgcaggccct
gccccctcgctaa
M12 VL amino acid sequence (SEQ ID NO: 574):
AIRLTQSPSLLSASVGDRVTVTCRASQGGGNYLAWYQQKPGKAPKLLIYGASKLQSGVP
SRFSGSGSGTEFTLTISSLQPEDFATYYCQQLNSYPVTFGQGTKVDIK
M12 VH amino acid sequence (SEQ ID NO: 575):
EVQLVESGAEVKKPGASVKVSCKASGYTFTTYYIHWVRQAPGQGLEWMGIINPSSGSTT
YTQKFQGRVTMTRDTSTSTVYIELSGLRSEDTAVYYCARGETLRGYFDYWGQGTLVTV
SS
M12 LCDR1 (SEQ ID NO: 576):
RASQGGGNYLA
M12 LCDR2 (SEQ ID NO: 577):
GASKLQS
M12 LCDR3 (SEQ ID NO: 578):
QQLNSYPVT
M12 HCDR1 (SEQ ID NO: 579):
TYYIH
M12 HCDR2 (SEQ ID NO: 580):
IINPSSGSTTYTQKFQG
M12 HCDR3 (SEQ ID NO: 581):
GETLRGYFDY
DNA template for M12.BBZ linear mRNA (SEQ ID NO: 582):
taatacgactcactataggatggccttaccagtgaccgccttgctcctgccgctggccttgctgctccacgccgccaggccggccatccggt
tgacccagtctccatccctcctgtctgcatctgtaggagacagggtcaccgtcacttgtcgggccagtcagggcggtggcaattatttagcct
ggtatcagcaaaaaccagggaaagccccgaaactcctgatctatggtgcatccaagttgcaaagtggggtcccatcgaggttcagcggca
gtggatctgggacagaattcactctcacaatcagcagtctgcagcctgaagattttgcaacttattactgtcaacagcttaatagttaccctgtc
acttttggccaggggaccaaagtggatatcaaaggtggtggtggttctggcggcggcggctccggaggtggtggatccgaggtgcagctg
gtggagtctggggctgaggtgaagaagcctggggcctcagtgaaggtttcctgcaaggcatctggatacaccttcaccacctactatataca
ctgggtgcgacaggcccctggacaagggcttgagtggatgggaataatcaaccctagtagtggtagcactacctacacacagaagttcca
gggcagagtcaccatgaccagggacacgtccacgagcacagtctacattgaactgagcggcctgagatctgaagacacggccgtgtatta
ctgtgcccgaggggagacgcttcggggctactttgactactggggccagggaaccctggtcaccgtctcttcaaccacgacgccagegcc
gcgaccaccaacaccggcgcccaccatcgcgtcgcagcccctgtccctgcgcccagaggcgtgccggccagcggcggggggcgcag
tgcacacgagggggctggacttcgcctgtgatatctacatctgggcgcccttggccgggacttgtggggtccttctcctgtcactggttatca
ccctttactgcaaacggggcagaaagaaactcctgtatatattcaaacaaccatttatgagaccagtacaaactactcaagaggaagatggct
gtagctgccgatttccagaagaagaagaaggaggatgtgaactgagagtgaagttcagcaggagcgcagacgcccccgcgtacaagca
gggccagaaccagctctataacgagctcaatctaggacgaagagaggagtacgacgttttggacaagagacgtggccgggaccctgaga
tggggggaaagccgagaaggaagaaccctcaggaaggcctgtacaatgaactgcagaaagataagatggcggaggcctacagtgagat
tgggatgaaaggcgagcgccggaggggcaaggggcacgatggcctttaccagggtctcagtacagccaccaaggacacctacgacgc
ccttcacatgcaggccctgccccctcgctaagtcgacagctcgctttcttgctgtccaatttctattaaaggttcctttgttccctaagtccaac
tactaaactgggggatattatgaagggccttgagcatctggattctgcctaataaaaaacatttattttcattgctgcgtcgagagctcgctttc
ttgctgtccaatttctattaaaggttcctttgttccctaagtccaactactaaactgggggatattatgaagggccttgagcatctggattctgc
ctaataaaaaacatttattttcattgctgcctcgacgaattcaaaaaaaaaaaaaaaaaaaaaaaaaaaaaaaaaaaaaaaaaaaaaaaaaaaaa
aaaaaaaaaaaaaaaaaaaaaaaaaaaaaaaaaaaaaaaaaaaaaaaaaaaaaaaaaaaaaaaaaaaaaaaaaaaaaaaaaaaaaaaaaa
aaaaaaa
DNA template for M12.BBZ circRNA (SEQ ID NO: 583)
taatacgactcactataggggagaccctcgaccgtcgattgtccactggtcaacaatagatgacttacaactaatcggaaggtgcagagact
cgacgggagctaccctaacgtcaagacgagggtaaagagagagtccaattctcaaagccaataggcagtagcgaaagctgcaagagaat
gaaaatccgttgaccttaaacggtcgtgtgggttcaagtccctccacccccacgccggaaacgcaatagccgaaaaacaaaaaacaaaaa
aaacaaaaaaaaaaccaaaaaaacaaaacacattaaaacagcctgtgggttgatcccacccacaggcccattgggcgctagcactctggt
atcacggtacctttgtgcgcctgttttataccccctcccccaactgtaacttagaagtaacacacaccgatcaacagtcagcgtggcacacca
gccacgttttgatcaagcacttctgttaccccggactgagtatcaatagactgctcacgcggttgaaggagaaagcgttcgttatccggccaa
ctacttcgaaaaacctagtaacaccgtggaagttgcagagtgtttcgctcagcactaccccagtgtagatcaggtcgatgagtcaccgcattc
cccacgggcgaccgtggcggtggctgcgttggcggcctgcccatggggaaacccatgggacgctctaatacagacatggtgcgaagag
tctattgagctagttggtagtcctccggcccctgaatgcggctaatcctaactgcggagcacacaccctcaagccagagggcagtgtgtcgt
aacgggcaactctgcagcggaaccgactactttgggtgtccgtgtttcattttattcctatactggctgcttatggtgacaattgagagatcgtt
accatatagctattggattggccatccggtgactaatagagctattatatatccctttgttgggtttataccacttagcttgaaagaggttaaaa
cattacaattcattgttaagttgaatacagcaaatctagagccaccatggccttaccagtgaccgccttgctcctgccgctggccttgctgctcc
acgccgccaggccggccatccggttgacccagtctccatccctcctgtctgcatctgtaggagacagggtcaccgtcacttgtcgggccagtca
gggcggtggcaattatttagcctggtatcagcaaaaaccagggaaagccccgaaactcctgatctatggtgcatccaagttgcaaagtggg
gtcccatcgaggttcagcggcagtggatctgggacagaattcactctcacaatcagcagtctgcagcctgaagattttgcaacttattactgtc
aacagcttaatagttaccctgtcacttttggccaggggaccaaagtggatatcaaaggtggtggtggttctggcggcggcggctccggaggt
ggtggatccgaggtgcagctggtggagtctggggctgaggtgaagaagcctggggcctcagtgaaggtttcctgcaaggcatctggatac
accttcaccacctactatatacactgggtgcgacaggcccctggacaagggcttgagtggatgggaataatcaaccctagtagtggtagca
ctacctacacacagaagttccagggcagagtcaccatgaccagggacacgtccacgagcacagtctacattgaactgagcggcctgagat
ctgaagacacggccgtgtattactgtgcccgaggggagacgcttcggggctactttgactactggggccagggaaccctggtcaccgtctc
ttcaaccacgacgccagcgccgcgaccaccaacaceggegcccaccatcgcgtcgcagcccctgtccctgcgcccagaggcgtgccg
gccagcggggggggcgcagtgcacacgagggggctggacttcgcctgtgatatctacatctgggcgcccttggccgggacttgtgggg
tccttctcctgtcactggttatcaccctttactgcaaacggggcagaaagaaactcctgtatatattcaaacaaccatttatgagaccagtacaa
actactcaagaggaagatggctgtagctgccgatttccagaagaagaagaaggaggatgtgaactgagagtgaagttcagcaggagcgc
agacgcccccgcgtacaagcagggccagaaccagctctataacgagctcaatctaggacgaagagaggagtacgacgttttggacaaga
gacgtggccgggaccctgagatggggggaaagccgagaaggaagaaccctcaggaaggcctgtacaatgaactgcagaaagataaga
tggcggaggcctacagtgagattgggatgaaaggcgagcgccggaggggcaaggggcacgatggcctttaccagggtctcagtacagc
caccaaggacacctacgacgcccttcacatgcaggccctgccccctcgctaagtcgacaaaaaacaaaaaacaaaacggctattatgcgtt
accggcgagacgctacggacttaaataattgagccttaaagaagaaattctttaagtggatgctctcaaactcagggaaacctaaatctagtta
tagacaaggcaatcctgagccaagccgaagtagtaattagtaagaccagtggacaatcgacggataacagcatatctag
DNA template for M12.BBZ-45A circRNA (SEQ ID NO: 584)
taatacgactcactataggggagaccctcgaccgtcgattgtccactggtcaacaatagatgacttacaactaatcggaaggtgcagagact
cgacgggagctaccctaacgtcaagacgagggtaaagagagagtccaattctcaaagccaataggcagtagcgaaagctgcaagagaat
gaaaatccgttgaccttaaacggtcgtgtgggttcaagtccctccacccccacgccggaaacgcaatagccgaaaaacaaaaaacaaaaa
aaacaaaaaaaaaaccaaaaaaaaaaacacattaaaacagcctgtgggttgatcccacccacaggcccattgggcgctagcactctggt
atcacggtacctttgtgcgcctgttttataccccctcccccaactgtaacttagaagtaacacacaccgatcaacagtcagcgtggcacacca
gccacgttttgatcaagcacttctgttaccccggactgagtatcaatagactgctcacgcggttgaaggagaaagcgttcgttatccggccaa
ctacttcgaaaaacctagtaacaccgtggaagttgcagagtgtttcgctcagcactaccccagtgtagatcaggtcgatgagtcaccgcattc
cccacgggcgaccgtggcggtggctgcgttggcggcctgcccatggggaaacccatgggacgctctaatacagacatggtgcgaagag
tctattgagctagttggtagtcctccggcccctgaatgcggctaatcctaactgcggagcacacaccctcaagccagagggcagtgtgtcgt
aacgggcaactctgcagcggaaccgactactttgggtgtccgtgtttcattttattcctatactggctgcttatggtgacaattgagagatcgtt
accatatagctattggattggccatccggtgactaatagagctattatatatccctttgttgggtttataccacttagcttgaaagaggttaaaa
cattacaattcattgttaagttgaatacagcaaatctagagccaccatggccttaccagtgaccgccttgctcctgccgctggccttgctgctcc
acgccgccaggccggccatccggttgacccagtctccatccctcctgtctgcatctgtaggagacagggtcaccgtcacttgtcgggccagtca
gggcggtggcaattatttagcctggtatcagcaaaaaccagggaaagccccgaaactcctgatctatggtgcatccaagttgcaaagtggg
gtcccatcgaggttcagcggcagtggatctgggacagaattcactctcacaatcagcagtctgcagcctgaagattttgcaacttattactgtc
aacagcttaatagttaccctgtcacttttggccaggggaccaaagtggatatcaaaggtggtggtggttctggcggcggcggctccggaggt
ggtggatccgaggtgcagctggtggagtctggggctgaggtgaagaagcctggggcctcagtgaaggtttcctgcaaggcatctggatac
accttcaccacctactatatacactgggtgcgacaggcccctggacaagggcttgagtggatgggaataatcaaccctagtagtggtagca
ctacctacacacagaagttccagggcagagtcaccatgaccagggacacgtccacgagcacagtctacattgaactgagcggcctgagat
ctgaagacacggccgtgtattactgtgcccgaggggagacgcttcggggctactttgactactggggccagggaaccctggtcaccgtctc
ttcaaccacgacgccagcgccgcgaccaccaacaccggegcccaccatcgcgtcgcagcccctgtccctgcgcccagaggcgtgccg
gccagcggggggggcgcagtgcacacgagggggctggacttcgcctgtgatatctacatctgggcgcccttggccgggacttgtgggg
tccttctcctgtcactggttatcaccctttactgcaaacggggcagaaagaaactcctgtatatattcaaacaaccatttatgagaccagtacaa
actactcaagaggaagatggctgtagctgccgatttccagaagaagaagaaggaggatgtgaactgagagtgaagttcagcaggagcgc
agacgcccccgcgtacaagcagggccagaaccagctctataacgagctcaatctaggacgaagagaggagtacgacgttttggacaaga
gacgtggccgggaccctgagatggggggaaagccgagaaggaagaaccctcaggaaggcctgtacaatgaactgcagaaagataaga
tggcggaggcctacagtgagattgggatgaaaggcgagcgccggaggggcaaggggcacgatggcctttaccagggtctcagtacagc
caccaaggacacctacgacgcccttcacatgcaggccctgccccctcgctaagtcgacaaaaaaaaaaaaaaaaaaaaaaaaaaaaaaa
aaaaaaaaaaaaaacaaaaaaaaaacggctattatgcgttaccggcgagacgctacggacttaaataattgagccttaaagaagaaattct
ttaagtggatgctctcaaactcagggaaacctaaatctagttatagacaaggcaatcctgagccaagccgaagtagtaattagtaagaccagt
ggacaatcgacggataacagcatatctag
DNA template for M12.BBZ-70A circRNA (SEQ ID NO: 585):
taatacgactcactataggggagaccctcgaccgtcgattgtccactggtcaacaatagatgacttacaactaatcggaaggtgcagagact
cgacgggagctaccctaacgtcaagacgagggtaaagagagagtccaattctcaaagccaataggcagtagcgaaagctgcaagagaat
gaaaatccgttgaccttaaacggtcgtgtgggttcaagtccctccacccccacgccggaaacgcaatagccgaaaaacaaaaaacaaaaa
aaacaaaaaaaaaaccaaaaaaaaaaacacattaaaacagcctgtgggttgatcccacccacaggcccattgggcgctagcactctggt
atcacggtacctttgtgcgcctgttttataccccctcccccaactgtaacttagaagtaacacacaccgatcaacagtcagcgtggcacacca
gccacgttttgatcaagcacttctgttaccccggactgagtatcaatagactgctcacgcggttgaaggagaaagcgttcgttatccggccaa
ctacttcgaaaaacctagtaacaccgtggaagttgcagagtgtttcgctcagcactaccccagtgtagatcaggtcgatgagtcaccgcattc
cccacgggcgaccgtggcggtggctgcgttggcggcctgcccatggggaaacccatgggacgctctaatacagacatggtgcgaagag
tctattgagctagttggtagtcctccggcccctgaatgcggctaatcctaactgcggagcacacaccctcaagccagagggcagtgtgtcgt
aacgggcaactctgcagcggaaccgactactttgggtgtccgtgtttcattttattcctatactggctgcttatggtgacaattgagagatcgtt
accatatagctattggattggccatccggtgactaatagagctattatatatccctttgttgggtttataccacttagcttgaaagaggttaaaa
cattacaattcattgttaagttgaatacagcaaatctagagccaccatggccttaccagtgaccgccttgctcctgccgctggccttgctgctcc
acgccgccaggccggccatccggttgacccagtctccatccctcctgtctgcatctgtaggagacagggtcaccgtcacttgtcgggccagtca
gggcggtggcaattatttagcctggtatcagcaaaaaccagggaaagccccgaaactcctgatctatggtgcatccaagttgcaaagtggg
gtcccatcgaggttcagcggcagtggatctgggacagaattcactctcacaatcagcagtctgcagcctgaagattttgcaacttattactgtc
aacagcttaatagttaccctgtcacttttggccaggggaccaaagtggatatcaaaggtggtggtggttctggcggcggcggctccggaggt
ggtggatccgaggtgcagctggtggagtctggggctgaggtgaagaagcctggggcctcagtgaaggtttcctgcaaggcatctggatac
accttcaccacctactatatacactgggtgcgacaggcccctggacaagggcttgagtggatgggaataatcaaccctagtagtggtagca
ctacctacacacagaagttccagggcagagtcaccatgaccagggacacgtccacgagcacagtctacattgaactgagcggcctgagat
ctgaagacacggccgtgtattactgtgcccgaggggagacgcttcggggctactttgactactggggccagggaaccctggtcaccgtctc
ttcaaccacgacgccagcgccgcgaccaccaacaccggcgcccaccategcgtcgcagcccctgtccctgcgcccagaggcgtgccg
gccagcggcggggggcgcagtgcacacgagggggctggacttcgcctgtgatatctacatctgggcgcccttggccgggacttgtgggg
tccttctcctgtcactggttatcaccctttactgcaaacggggcagaaagaaactcctgtatatattcaaacaaccatttatgagaccagtacaa
actactcaagaggaagatggctgtagctgccgatttccagaagaagaagaaggaggatgtgaactgagagtgaagttcagcaggagcgc
agacgcccccgcgtacaagcagggccagaaccagctctataacgagctcaatctaggacgaagagaggagtacgacgttttggacaaga
gacgtggccgggaccctgagatggggggaaagccgagaaggaagaaccctcaggaaggcctgtacaatgaactgcagaaagataaga
tggcggaggcctacagtgagattgggatgaaaggcgagcgccggaggggcaaggggcacgatggcctttaccagggtctcagtacagc
caccaaggacacctacgacgcccttcacatgcaggccctgccccctcgctaagtcgacaaaaaaaaaaaaaaaaaaaaaaaaaaaaaaa
aaaaaaaaaaaaaaaaaaaaaaaaaaaaaaaaaaaaaaaacaaaaaacaaaacggctattatgcgttaccggcgagacgctacggactta
aataattgagccttaaagaagaaattctttaagtggatgctctcaaactcagggaaacctaaatctagttatagacaaggcaatcctgagccaa
gccgaagtagtaattagtaagaccagtggacaatcgacggataacagcatatctag
T7 Promoter (SEQ ID NO: 586)
taatacgactcactatag
Homology arm-1 (SEQ ID NO: 587)
gggagaccctcgaccgtcgattgtccactggtc
Anabaena intron-1 (SEQ ID NO: 588)
aacaatagatgacttacaactaatcggaaggtgcagagactcgacgggagctaccctaacgtcaagacgagggtaaagagagagtccaat
tctcaaagccaataggcagtagcgaaagctgcaagagaatgaaaatccgttgaccttaaacggtcgtgtgggttcaagtccctccaccccc
a
Spacer-1 (SEQ ID NO: 589)
cgccggaaacgcaatagccgaaaaacaaaaaacaaaaaaa
CVB3 IRES (SEQ ID NO: 590)
ttaaaacagcctgtgggttgatcccacccacaggcccattgggcgctagcactctggtatcacggtacctttgtgcgcctgttttataccccct
cccccaactgtaacttagaagtaacacacaccgatcaacagtcagcgtggcacaccagccacgttttgatcaagcacttctgttaccccgga
ctgagtatcaatagactgctcacgcggttgaaggagaaagcgttcgttatccggccaactacttcgaaaaacctagtaacaccgtggaagtt
gcagagtgtttcgctcagcactaccccagtgtagatcaggtcgatgagtcaccgcattccccacgggcgaccgtggcggtggctgcgttgg
cggcctgcccatggggaaacccatgggacgctctaatacagacatggtgcgaagagtctattgagctagttggtagtcctccggcccctga
atgcggctaatcctaactgcggagcacacaccctcaagccagagggcagtgtgtcgtaacgggcaactctgcagcggaaccgactacttt
gggtgtccgtgtttcattttattcctatactggctgcttatggtgacaattgagagatcgttaccatatagctattggattggccatccggtgac
taatagagctattatatatccctttgttgggtttataccacttagcttgaaagaggttaaaacattacaattcattgttaagttgaatacagcaa
a
Spacer-2 (SEQ ID NO: 591)
aaaaaacaaaaaacaaaacggctattatgcgttaccggcg
Anabaena intron-2 (SEQ ID NO: 592)
agacgctacggacttaaataattgagccttaaagaagaaattctttaagtggatgctctcaaactcagggaaacctaaatctagttatagacaa
ggcaatcctgagccaagccgaagtagtaattagtaag
Homology arm-2 (SEQ ID NO: 593)
accagtggacaatcgacggataacagcatatctag
45A (SEQ ID NO: 594)
aaaaaaaaaaaaaaaaaaaaaaaaaaaaaaaaaaaaaaaaaaaaa
70A (SEQ ID NO: 595)
aaaaaaaaaaaaaaaaaaaaaaaaaaaaaaaaaaaaaaaaaaaaaaaaaaaaaaaaaaaaaaaaaaaaaa
150A (SEQ ID NO: 596)
aaaaaaaaaaaaaaaaaaaaaaaaaaaaaaaaaaaaaaaaaaaaaaaaaaaaaaaaaaaaaaaaaaaaaaaaaaaaaaaaaaaaaaa
aaaaaaaaaaaaaaaaaaaaaaaaaaaaaaaaaaaaaaaaaaaaaaaaaaaaaaaa???????
3′UTR (SEQ ID NO: 597)
agctcgctttcttgctgtccaatttctattaaaggttcctttgttccctaagtccaactactaaactgggggatattatgaagggccttgagcat
ctggattctgcctaataaaaaacatttattttcattgctgcgtcgagagctcgctttcttgctgtccaatttctattaaaggttcctttgttccc
taagtccaactactaaactgggggatattatgaagggccttgagcatctggattctgcctaataaaaaacatttattttcattgctgcctcgacg
aattc
anti-MSLN scFv in anti-MSLN M12.BBZ CAR (SEQ ID NO: 598)
AIRLTQSPSLLSASVGDRVTVTCRASQGGGNYLAWYQQKPGKAPKLLIYGASKLQSGVP
SRFSGSGSGTEFTLTISSLQPEDFATYYCQQLNSYPVTFGQGTKVDIKGGGGSGGGGSGG
GGSEVQLVESGAEVKKPGASVKVSCKASGYTFTTYYIHWVRQAPGQGLEWMGIINPSS
GSTTYTQKFQGRVTMTRDTSTSTVYIELSGLRSEDTAVYYCARGETLRGYFDYWGQGT
LVTVSS
anti-MSLN M12.BBZ CAR without a signal peptide (SEQ ID NO: 599)
AIRLTQSPSLLSASVGDRVTVTCRASQGGGNYLAWYQQKPGKAPKLLIYGASKLQSGVP
SRFSGSGSGTEFTLTISSLQPEDFATYYCQQLNSYPVTFGQGTKVDIKGGGGSGGGGSGG
GGSEVQLVESGAEVKKPGASVKVSCKASGYTFTTYYIHWVRQAPGQGLEWMGIINPSS
GSTTYTQKFQGRVTMTRDTSTSTVYIELSGLRSEDTAVYYCARGETLRGYFDYWGQGT
LVTVSSTTTPAPRPPTPAPTIASQPLSLRPEACRPAAGGAVHTRGLDFACDIYIWAPLAGT
CGVLLLSLVITLYCKRGRKKLLYIFKQPFMRPVQTTQEEDGCSCRFPEEEEGGCELRVKF
SRSADAPAYKQGQNQLYNELNLGRREEYDVLDKRRGRDPEMGGKPRRKNPQEGLYNE
LQKDKMAEAYSEIGMKGERRRGKGHDGLYQGLSTATKDTYDALHMQALPPR

### REFERENCES

[0460] 1. R. Alexander Wesselhoeft, Piotr S. Kowalski & Daniel G. Anderson, Engineering circular RNA for potent and stable translation in eukaryotic cells, Nature Communications, 2629 (2018).

### Example 2

### 1. In Vitro Cytotoxicity Assay of Anti-BCMA or Anti-CD19 CAR-T Cells

[0461] 1.1 Prepare CAR-T cells comprising anti-BCMA CAR linear mRNA, anti-BCMA CAR circRNA, anti-CD19 CAR linear mRNA and anti-CD19 CAR circRNA, respectively. Specifically, M12.BBZ in pDA-M12.BBZ, pCA-M12.BBZ, and pCA70-M12.BBZ CAR plasmid is replaced with BCMA CAR-31 or FMC63 CAR, generating pDA-BCMA CAR-31, pCA-BCMA CAR-31, and pCA70-BCMA CAR-31. M12.BBZ in pDA-M12.BBZ, pCA-M12.BBZ, and pCA70-M12.BBZ CAR plasmid is replaced with FMC63 CAR, generating pDA-FMC63 CAR, pCA-FMC63 CAR, and pCA70-FMC63 CAR. These plasmids are transcribed in vitro and then purified as described in Example 1 to obtain BCMA CAR-31 linear mRNA, BCMA CAR-31 circRNA, BCMA CAR-31 circRNA-70A, FMC63 CAR linear mRNA, FMC63 CAR circRNA and FMC63 CAR circRNA-70A, which are then transferred to T cell by electroporation respectively to obtain anti-BCMA CAR-T and anti-CD19 CAR-T cells, wherein linear mRNA is derived from pDA-CAR plasmid, circRNA is derived from pCA-CAR plasmid and circRNA-70A is derived form pCA70-CAR plasmid. BCMA CAR-31 is a CAR comprising GM-CSF signal peptide, BCMA31 scFv (SEQ ID NO: 244), CD8 hinge domain, CD8 transmembrane (TM) domain, 4-1BB costimulatory domain and CD3ζ domain. The amino acid sequence of BCMA CAR-31 is as set forth in SEQ ID NO: 256 and the nucleic acid sequence of BCMA CAR-31 is as set forth in SEQ ID NO: 1003. FMC63 CAR is an anti-CD19 CAR commercially available, comprising CD8 signal peptide, an anti-FMC63 scFv, CD8 hinge domain, CD8 transmembrane (TM) domain, 4-1BB costimulatory domain and CD3ζ domain the amino acid sequence of which is as set forth in SEQ ID NO: 997 and the nucleic acid sequence of which is as set forth in SEQ ID NO: 998.
[0462] 1.2 12 hours before coculture, seed RPMI-8226-CBG and Raji-CBG to flat-bottomed 96-well plate with 3000 cells/100 μl/well.
[0463] 1.3 About 12 to 24 hours post electroporation, count and dilute CAR-T cells to appropriate concentration, seed cells with 100 μl/well to tumor cells with E/T ratio 2:1.
[0464] 1.4 Put the co-culture plate into IncuCyte S3 machine, and setup scanning parameters.
[0465] 1.5 After 4 days scanning, the Total Green Object Integrated Intensity (GCU×μm²/Well) was analyzed to calculate the killing efficiency.

[0466] Coculture assay using these CAR-T cells with BCMA or CD19 expressing tumor cells also demonstrated the higher killing ability of the circRNA-70A CAR-T group than linear mRNA CAR-T group and circRNA CAR-T group (FIG. 14A-14B).

### 2. In Vitro Cytotoxicity Assay of LACOSTIM-Expressing M12 CART Cells, LACOSTIM-Expressing BCMA CART Cells, LACOSTIM-Expressing FMC63 CART Cells.

[0467] 2.1 LACOSTIM-expressing M12 CAR-T cells are generated by electroporated with LACOSTIM and M12 CAR linear mRNA or circRNA. Specifically, M12.BBZ in pDA-M12.BBZ and pCA70-M12.BBZ CAR plasmid is replaced with A40C28 (SEQ ID NO: 600), generating pDA-A40C28 and pCA70-A40C28 plasmid. M12.BBZ linear mRNA and M12.BBZ circRNA-70A are prepared as described in Example 1. BCMA CAR-31 linear mRNA, BCMA CAR-31 circRNA-70A, FMC63 CAR linear mRNA, and FMC63 CAR circRNA-70A are prepared as described above in this Example. pDA-A40C28 and pCA70-A40C28 plasmid is transcribed in vitro and then purified as described in Example 1 to obtain A40C28 linear mRNA and A40C28 circRNA-70A.
[0468] 2.2 LACOSTIM-expressing M12 CAR-T cells are generated by electroporated 5E6 T cells with g M12.BBZ linear RNA and 10 μg A40C28 linear RNA, or 10 μg M12.BBZ circRNA-70A and 10 μg A40C28 circRNA. LACOSTIM-expressing BCMA31 CAR-T cells and LACOSTIM-expressing CD19 CAR-T cells are prepared by the same method, except that M12.BBZ linear RNA and M12.BBZ circRNA-70A are replaced by BCMA CAR-31 linear mRNA and BCMA CAR-31 circRNA-70A, or FMC63 CAR linear mRNA and FMC63 CAR circRNA-70A.
[0469] 2.3 12 hours before coculture, seed OVCAR3-CBG, RPMI-8226-CBG and Raji-CBG to flat-bottomed 96-well plate with 3000 cells/100 l/well.
[0470] 2.4 About 12 to 24 hours post electroporation, count and dilute three groups of CAR-T cells (see the following Table 1 for details.) to appropriate concentration, seed cells with 100 ul/well to tumor cells with E/T ratio 2:1.

TABLE 1
2.5

| Group | Different electroporation components | mRNA quality |
|---|---|---|
| Group 1 | NO EP | 0 |
| | M12 CAR linear mRNA | 10 μg |
| | M12 CAR circRNA-70A | 10 μg |
| | M12 CAR + A40C28 linear mRNA | 10 μg, 10 μg |
| | M12 CAR + A40C28 circRNA-70A | 10 μg, 10 μg |
| Group 2 | NO EP | 0 |
| | BCMA CAR-31 linear mRNA | 10 μg |
| | BCMA CAR-31 circRNA-70A | 10 μg |
| | BCMA CAR-31 + A40C28 linear | 10 μg, 10 μg |
| | mRNA | |
| | BCMA CAR-31 + A40C28 circRNA- | 10 μg, 10 μg |
| | 70A | |
| Group 3 | NO EP | 0 |
| | FMC63 CAR linear mRNA | 10 μg |
| | FMC63 CAR circRNA-70A | 10 μg |
| | FMC63 CAR + A40C28 linear mRNA | 10 μg, 10 μg |
| | FMC63 CAR + A40C28 circRNA-70A | 10 μg, 10 μg |

[0471] 2.6 Put the co-culture plate into IncuCyte S3 machine, and setup scanning parameters.
[0472] 2.7 After 4 days scanning, the Total Green Object Integrated Intensity (GCU×μm²/Well) was analyzed to calculate the killing efficiency.

[0473] As shown in FIG. 15A-15C, coculture assay using these CAR-T cells with or without LACOSTIM-expressed demonstrated the higher killing ability of the circRNA-70A CAR-T group than linear mRNA CAR-T group, LACOSTIM-expressed CAR-T cells have higher killing ability than CAR only cells, and LACOSTIM-expressed CAR-T cells in circRNA also have the higher killing ability of linear LACOSTIM-expressed CAR-T cells.

### Example 3: Preparation of Antibodies and CARs Targeting MESO, CD123 and BCMA

### Preparation of Antibodies

[0474] Antibodies were prepared using fully human antibody phage display library, and have been described in Patent Application No. PCT/CN2022/112724, PCT/CN2022/112728 and PCT/CN2022/112726, which are capable of specifically recognizing mesothelin (MESO) (a total of 37 antibodies, M1-M37 respectively), CD123 (a total of 35 antibodies, C1-C35 respectively), and BCMA (a total of 15 antibodies, BCMA21-BCMA35 respectively), respectively. FIG. 16A-16C provides the reads of two 96-well plates of anti-human mesothelin (or BCMA, CD123)-Fc monoclonal phage ELISA.

[0475] Cloning and sequence analysis: positive clones were selected according to the ELISA results and used as templates for PCR cloning of the scFv sequence. The CDR regions of scFv were analyzed through abysis website (http://abysis.org/) according to Kabat numbering scheme. Screening of functional anti-BCMA scFv(s) in T cell: anti-BCMA scFv(s) were constructed into a bicistronic lentiviral CAR expression vector, which contained an IRES-truncated EGFR (tEGFR) expressing cassette. Lentivirus was generated by transient transfection in 293T cells, then purified and concentrated by ultra-centrifuge. T cells were transduced with CAR lentivirus to generate CAR-T cells, and cultured for another 10 days. 10 days after lentivirus-transduction, CAR-T cells were collected and stained with 5 μg/ml CD19-Fc protein (Ctrl Fc protein) or BCMA-Fc recombinant protein at 4° C. for 30 min. After washing, the CAR-T cells were stained with anti-human IgG Fc and anti-EGFR mAb. Sample was analyzed by flow cytometry. As shown, T cells expressing CARs comprising the following anti-BCMA scFv(s) showed binding to BCMA-Fc (FIG. 17B) and were selected for further studies: BCMA21 (SEQ ID NO: 237), BCMA22 (SEQ ID NO: 238), BCMA23 (SEQ ID NO: 239), BCMA24 (SEQ ID NO: 240), BCMA27 (SEQ ID NO: 241), BCMA28 (SEQ ID NO: 242), BCMA30 (SEQ ID NO: 243), BCMA31 (SEQ ID NO: 244), BCMA32 (SEQ ID NO: 245), BCMA33 (SEQ ID NO: 246), BCMA34 (SEQ ID NO: 247), and BCMA35 (SEQ ID NO: 248).

### Preparation of CARs

[0476] Vectors for generating mRNA of different target CAR were constructed. First, the scFv sequences of the above antibodies with a CD8 signal peptide at the N-terminus and CAR fragment (from hinge domain to CD3-zeta domain, comprising CD8 hinge domain, CD8 transmembrane domain, 4-1BB costimulatory domain and CD3ζ domain.) were amplified by PCR and cloned into pDA vector (Xba1/Sal1). FIG. 18 provides the schematic representation of pDA-CAR vector used for CAR mRNA generation as an example. Second, different CAR mRNA was prepared by in vitro transcription (IVT). The pDA-CAR plasmid was linearized by digestion with Spe1 enzyme and purified by PCR Cleanup kit. After the DNA concentration was measured by nanodrop and checked by running agarose DNA gel, IVT was performed following the protocol of manufacturer (Thermofisher, Cat No: AM13455). The concentration of RNA product was measured by nanodrop and checked by running PAGE gel.

### Example 4: Preparation and Characterization of CARTs

[0477] CAR mRNA of different targets prepared in Example 3 was introduced into A549 tumor cells and T cells (CART cells) by electroporation with the following procedures: A549 tumor cells and T cells were collected and washed with Opti-MEM medium for 3 times. The cell pellets were resuspended with Opti-MEM medium, and the cell concentration was adjusted to 1×10e7/ml. 10 μg RNA was aliquoted to 1.5 ml EP tube, added with 100 μl T cells or A549 cells, and mixed well. 100 μl cells mixed with RNA were added to the BTX electroporation cup, tapped to avoid bubble. Electroporation was performed using BTX machine at the following parameters: For T cells: 500 voltage, 0.7 ms; for A549 tumor cell: 300 voltage, 0.5 ms. The cells were then transferred to pre-warmed culture medium and culture at 37° C.

### (1) Mesothelin

[0478] Binding of CART cells to different targets-Fc recombinant protein was measured by FACS staining. As shown in FIG. 19, anti-mesothelin scFv-M1, -M2, -M3, -M6, -M7, -M8, -M9, -M10, -M11, -M12, -M13, -M14, -M15, -M16, -M17, -M20, -M22, -M23, -M24, -M25, -M27, -M28, -M29, -M30, -M31, -M32, -M33, -M34, -M35, -M36 and -M37, bound to mesothelin-Fc recombinant protein. T cell without CAR molecule served as control (“Mock”). As shown in FIG. 20A-20B, the ectopic expression level of mesothelin correlated with the amount of mesothelin mRNA that was introduced into A549 cells via electroporation.

[0479] The cytotoxicity of the mesothelin CART cells against tumor cells was measured in in vitro cytotoxicity assay. EGFP-expressing tumor cell lines or EGFP-A549 cells that were electroporated with different amount of tumor antigen were seeded on flat-bottomed 96-well plate at 3000 cells/100 μl/well. CART cells were diluted to appropriate concentration, seeded at 100 l/well with tumor cells at different E/T ratios, such as 10:1, 3:1, 1:1. The co-culture plates were placed into IncuCyte S3 machine, and scanning parameters were set. After 3 days of scanning, the Total Green Object Integrated Intensity (GCU×μm² μl/well) was analyzed to calculate the killing efficiency.

[0480] A549 cells express mesothelin at low level. As shown in FIG. 21, CART cells expressing anti-mesothelin scFv-M4, -M22, -M28 and -M31 effectively impeded the growth of A549 cells, indicating that these scFv-based CART cells had comparably high cytotoxicity against tumor cells. As shown in FIG. 22, CART cells expressing anti-mesothelin scFv-M4, -M6, -M7, -M8, -M9, -M10, -M11, -M12, -M13, -M15, -M20, -M22, -M23, -M24, -M27, -M28, -M31, -M32, -M35, -M37 and -M38 CART cells showed effectively killing effect toward the mesothelin overexpressing A549 tumor cells (electroporated with 10 μg mesothelin mRNA). As shown in FIG. 23A, CART cells expressing anti-mesothelin scFv-M4, -M6, -M13, -M20, -M27, -M31, and -M37 CART maintained strong killing effect to A549 tumor cells with less ectopic expression of mesothelin (electroporated with 2 μg mesothelin mRNA). CART cells expressing anti-mesothelin scFv-M7, -M8, -M9, -M10, -M11, -M12, -M15, -M23, -M24, -M32, -M35, and -M38, which selectively showed high cytotoxicity toward tumor cells with high mesothelin expression but not those with low mesothelin expression had superior safety, as mesothelin is expressed in certain normal tissues.

[0481] A separate experiment was conducted using ss1 CAR transduced T cells as a control. T cells that were transduced with M12 CARs displayed best specificity and effectivity than ss1 CART cells among all the CARs tested, (FIG. 23B). T cell with CAR molecule derived from the single chain anti-mesothelin monoclonal antibody SS1 (scFv, published in Chowdhury, et al., 1998, Proc Natl Acad Sci USA 95: 669-674) served as control (“SS1”). and the construction of ss1 CAR comprises ss1.BBZ, CD8 hinge, CD8 transmembrane domain, 4-1BB co-stimulatory domain and CD3-zeta signaling domain.

[0482] FIG. 23C. shows the killing curves of different mRNA-based anti-mesothelin CART cells, with A549-GFP tumor cells electroporated with 0 (upper panel), 2 μg (middle panel) or 10 μg (lower panel) mesothelin mRNA being the target cells (E/T ratio=10:1). As shown, that anti-mesothelin scFv-M12, -M24 and -M32 CART cells had moderate killing effect toward the A549 tumor cells with low mesothelin expression (2 μg group), but strong killing effect toward A549 tumor cells with high mesothelin expression (10 μg group). The results indicated that these CART cells would specifically target tumor cells with high mesothelin expression, and spare the normal tissues with low mesothelin expression.

[0483] FIG. 24 shows the FACS staining of OVCAR3 (human ovarian cancer cells), H226 (human lung carcinoma cells), ASPC1 (human pancreatic tumor cells), A549 (human lung cancer cells) and HCC70 (human breast cancer cells) with isotype control and anti-mesothelin mAb. As shown, certain cancer cells, including OVCAR3, H226 and ASPC1, express mesothelin at high level; A549 express mesothelin at low level, and HCC70 does not express mesothelin.

### (2) BCMA

[0484] we constructed 12 different anti-BCMA CARs using the anti-BCMA scFv(s) described above. Three other CART products were tested in parallel, including NBC10 (Novartis AG and University of Pennsylvania, BMCA10.BBz), FHVH33 (National Institutes of Health, US), and B38M (Nanjing Legend Biotech). All tested CARs had a 41BBz coactivation domain.

TABLE 2
BCMA CARTs, CAR %, and Expression Levels

| CART | scFv | CAR % | MFI |
|---|---|---|---|
| 1 | NBC10 | 22% | 1.2E+05 |
| 2 | FHVH33 | 84% | 3.2E+05 |
| 3 | BCMA21 | 31% | 1.6E+05 |
| 4 | BCMA22 | 12% | 7.5E+04 |
| 5 | BCMA23 | 18% | 2.2E+05 |
| 6 | BCMA24 | 23% | 9.4E+04 |
| 7 | BCMA27 | 27% | 1.7E+05 |
| 8 | BCMA28 | 29% | 6.5E+04 |
| 9 | BCMA30 | 25% | 4.6E+04 |
| 10 | BCMA31 | 37% | 2.5E+05 |
| 11 | BCMA32 | 19% | 5.6E+04 |
| 12 | BCMA33 | 27% | 2.6E+05 |
| 13 | BCMA34 | 16% | 9.5E+04 |
| 14 | BCMA35 | 18% | 1.1E+05 |
| 15 | B38M | 51% | 5.8E+05 |
| 16 | NTD | | |

[0485] T cells were transduced by lentiviral vectors to express different BCMA CARs. Table 2 above shows the CART cells used in the studies disclosed herein, the percentage of the CAR-expressing cells, and their respective expression levels. FIGS. 25A and 25B show the frequencies of CAR+ T cells and their expression levels (Mean Fluorescence Intensity; “MFI”), respectively. Among the twelve scFv we generated, BCMA31 (#10; SEQ ID NO:256) and BCMA33 (#12; SEQ ID NO:258) were expressed at higher levels than the rest. FIG. 26 shows comparable frequencies of CAR+CD8 cells among tested CARTs. FIG. 27 shows the phenotypes of CART cells. The frequencies of naive T cell population (CD45RO−; CCR7+) in BCMA27 (#7), BCMA31 (#10) and BCMA33 (#12) T cells were higher than those in other samples, indicating these T cells were less differentiated.

### (3) CD123

[0486] CD123 CAR mRNA was introduced into T cells by electroporation with the following procedures: T cells were collected and washed with Opti-MEM medium, and resuspended with Opti-MEM medium at 1×10e7/ml; 10 μg RNA was aliquoted with 100 μl T cells, mixed well for electroporation at the following parameters (BTX machine): 500 voltage, 0.7 ms; the cells were then transferred to pre-warmed culture medium and culture at 37° C.

[0487] Binding of CD123 CART cells to CD123-Fc recombinant protein was measured by FACS staining. As shown in FIG. 28, T cells expressing CARs having anti-CD123 scFv-C1, -C2, -C3, -C4, -C5, -C6, -C7, -C9, -C10, -C11, -C13, -C14, -C15, -C16, -C17, -C18, -C19, -C21, -C23, -C24, -C25, -C26, -C27, -C28, -C29, -C30, -C32, -C33, -C34 and -C35 were able to bind to CD123-Fc recombinant protein. Mock was control T cell without CAR molecule.

[0488] A549 tumor cells were electroporated with different amount of CD123 mRNA. The electroporation procedure was the same as described above for T cells, except that a setting of 300 voltage, 0.5 ms was used. Expression of CD123 in A549 tumor cells was measured by FACS staining of the A549 cells electroporated with different amount of CD123 mRNA with isotype or anti-CD123 antibody. As shown in FIG. 29, A549 cells weakly expressed endogenous CD123, and the ectopic expression level of CD123 correlated with the amount of CD123 mRNA that was electroporated into A549 cells.

[0489] The cytotoxicity of the CD123 CART cells against tumor cells was measured in in vitro cytotoxicity assay. EGFP-expressing tumor cells or EGFP-A549 cells that were electroporated with different amount of tumor antigen were seeded on flat-bottomed 96-well plate at 3000 cells/100 ul/well; CART cells were diluted to appropriate concentration and seeded with 100 ul/well tumor cells at different E/T ratios, such as 10:1, 3:1, 1:1; the co-culture plates were then placed in IncuCyte S3 machine, and scanning parameters were set. After 3 days scanning, the Total Green Object Integrated Intensity (GCU×μm²/Well) was analyzed to calculate the killing efficiency.

[0490] FIG. 30 and FIG. 31 show the killing curves of different mRNA-based anti-CD123 CART cells against A549-GFP tumor cells at E/T ratio of 10:1 (FIG. 30) or 3:1 (FIG. 31). As shown, CART cells expressing anti-CD123 scFv-C2, -C3, -C4, -C6, -C9, -C11, -C13, -C14, -C15, -C16, -C17, -C19, -C21, -C23, -C24 and -C32 effectively arrested the growth and even eliminated A549 cells, despite that A549 cells expressed low level endogenous CD123, indicating that these scFv-based CART cells had comparably high cytotoxicity against tumor cells.

[0491] FIG. 32 and FIG. 33 show the killing curves of different mRNA-based anti-CD123 CART cells against A549-GFP tumor cells that expressed exogenous CD123 (electroporated with 10 μg CD123 mRNA) at E/T ratio of 10:1 (FIG. 32) or 3:1 (FIG. 33). As shown, CART cells expressing anti-CD123 scFv-C1, -C2, -C3, -C4, -C5, -C6, -C7, -C9, -C11, -C13, -C14, -C15, -C16, -C17, -C18, -C19, -C21, -C23, -C24, -C25, -C26, -C27, -C28, -C29, -C30, -C32, -C33, -C34 and -C35 CART cells effectively arrested the growth and even reduced the number of the CD123 expressing-A549 tumor cells, confirming their abilities to kill CD123 expressing tumor cells.

[0492] The sequences of the screened antibodies and CARs in Examples 1-2 are shown in Tables 3 and 4.

TABLE 3
The CDR regions of scFv (Kabat)

| Antibody | VL CDR1 | VL CDR2 | VL CDR3 |
|---|---|---|---|
| M6 | RASQSIGNSLA | DVSNRAT | QHRYSWPLT |
| | (SEQ ID NO: 1) | (SEQ ID NO: 16) | (SEQ ID NO: 30) |
| M7 | RASQAISSALA | DASTLES | QQADSFPLT |
| | (SEQ ID NO: 2) | (SEQ ID NO: 17) | (SEQ ID NO: 31) |
| M8 | RASQSISSSLN | AASSLQS | QQSYSTPLT |
| | (SEQ ID NO: 3) | (SEQ ID NO: 18) | (SEQ ID NO: 32) |
| M10 | RASQSISSWLA | KASSLES | QQYYSYPLT |
| | (SEQ ID NO: 4) | (SEQ ID NO: 19) | (SEQ ID NO: 33) |
| M12 | RASQGGGNYLA | GASKLOS | QQLNSYPVT |
| | (SEQ ID NO: 5) | (SEQ ID NO: 20) | (SEQ ID NO: 34) |
| M13 | RASQGISNSLA | AASRLES | QQYYSTPFT |
| | (SEQ ID NO: 6) | (SEQ ID NO: 21) | (SEQ ID NO: 35) |
| M15 | RASQGVNSALA | DASSLES | QQFSSYPLT |
| | (SEQ ID NO: 7) | (SEQ ID NO: 22) | (SEQ ID NO: 36) |
| M20 | RASQGISSAVA | YASSLES | QQFNSYPLT |
| | (SEQ ID NO: 8) | (SEQ ID NO: 23) | (SEQ ID NO: 37) |
| M22 | TGTRRDIGGYEYVS | SVNNRPS | SSYSSRDTLVL |
| | (SEQ ID NO: 9) | (SEQ ID NO: 24) | (SEQ ID NO: 38) |
| M24 | SGSSSNIGSNYVY | MNNQRPS | AARDDSLSGYVT |
| | (SEQ ID NO: 10) | (SEQ ID NO: 25) | (SEQ ID NO: 39) |
| M27 | RASQPIVASHLA | GASTRAA | QQYGISPF |
| | (SEQ ID NO: 11) | (SEQ ID NO: 26) | (SEQ ID NO: 40) |
| M28 | SGTSSDVGGYNFVS | EVSKRPS | SSYAGRNNPYL |
| | (SEQ ID NO: 12) | (SEQ ID NO: 27) | (SEQ ID NO: 41) |
| M31 | TGTSSDIGGYNSVS | GVSRRPS | SSYGGSNNLL |
| | (SEQ ID NO: 13) | (SEQ ID NO: 28) | (SEQ ID NO: 42) |
| M32 | QASEDINNSLN | DASDLET | QQLNSYPLT |
| | (SEQ ID NO: 14) | (SEQ ID NO: 29) | (SEQ ID NO: 43) |
| M37 | RASQGISNYLA | AASSLOS | QQYSSYPIT |
| | (SEQ ID NO: 15) | (SEQ ID NO: 18) | (SEQ ID NO: 44) |
| Antibody | VH CDR1 | VH CDR2 | VH CDR3 |
| M6 | DYYMS | YISSSGSTIYYADSVKG | DGYRTHNWFDP |
| | (SEQ ID NO: 45) | (SEQ ID NO: 58) | (SEQ ID NO: 71) |
| M7 | AYWIA | IIYPGDSRVIYSPYFQG | FGGPKFATNWFDI |
| | (SEQ ID NO: 46) | (SEQ ID NO: 59) | (SEQ ID NO: 72) |
| M8 | GYAMY | AITTNGGSTNYADSVKG | GAPGYRGYYMDV |
| | (SEQ ID NO: 47) | (SEQ ID NO: 60) | (SEQ ID NO: 73) |
| M10 | SYAMS | AISGSGGSTYYADSVKG | RGSSWYFDY |
| | (SEQ ID NO: 48) | (SEQ ID NO: 61) | (SEQ ID NO: 74) |
| M12 | TYYIH | IINPSSGSTTYTQKFQG | GETLRGYFDY |
| | (SEQ ID NO: 49) | (SEQ ID NO: 62) | (SEQ ID NO: 75) |
| M13 | ANTIN | RIIPSLNIRDYAQEFQG | DPGSTWSPNQFFPH |
| | (SEQ ID NO: 50) | (SEQ ID NO: 63) | (SEQ ID NO: 76) |
| M15 | SYYMH | IINPSGGSTSYAQKFQG | AQRGGSVYFDY |
| | (SEQ ID NO: 51) | (SEQ ID NO: 64) | (SEQ ID NO: 77) |
| M20 | DSWIA | IIFPGDSNPIYSPSFQG | HAAWGAGWFDP |
| | (SEQ ID NO: 52) | (SEQ ID NO: 65) | (SEQ ID NO: 78) |
| M22 | SYAIS | GIIPIFGTANYAQKFQG | GRSGSYGLY |
| | (SEQ ID NO: 53) | (SEQ ID NO: 66) | (SEQ ID NO: 79) |
| M24 | SYAMS | AISGSGGSTYYADSVKG | GVATFDY |
| | (SEQ ID NO: 48) | (SEQ ID NO: 61) | (SEQ ID NO: 80) |
| M27 | DYWIG | WITPNNGNTNYAPKFQG | RGRNSSGYLYYYSMDV |
| | (SEQ ID NO: 54) | (SEQ ID NO: 67) | (SEQ ID NO: 81) |
| M28 | SYAIS | GIIPIFGTANYAQKFQG | DLGGYSYGHGLDY |
| | (SEQ ID NO: 53) | (SEQ ID NO: 66) | (SEQ ID NO: 82) |
| M31 | SSWMA | NIKQDGSSQYYVDSVKG | DIWYSIDY |
| | (SEQ ID NO: 55) | (SEQ ID NO: 68) | (SEQ ID NO: 83) |
| M32 | GYYLH | IINPSGGRTSMAQKFQG | ADNWNAGSMDV |
| | (SEQ ID NO: 56) | (SEQ ID NO: 69) | (SEQ ID NO: 84) |
| M37 | PYYWT | YIHYSGRTNYNPSLES | VGDPGLFDY |
| | (SEQ ID NO: 57) | (SEQ ID NO: 70) | (SEQ ID NO: 85) |
| Antibody | VL CDR1 | VL CDR2 | VL CDR3 |
| BCMA21 | RASQSVSSNFLA | GASNRAT | QHYDGSPPMYT |
| | SEQ ID NO: 146 | SEQ ID NO: 156 | SEQ ID NO: 167 |
| BCMA22 | TGTSSDVGGYNYVS | EVTNRPS | ISYTSSSTLDYV |
| | SEQ ID NO: 147 | SEQ ID NO: 157 | SEQ ID NO: 168 |
| BCMA23 | SGSSPNIGGNSVN | TNNQRPS | AAWDDSLNGVV |
| | SEQ ID NO: 148 | SEQ ID NO: 158 | SEQ ID NO: 169 |
| BCMA24 | SGSSSNIGSYSVN | SNNQRPS | AAWDDSLNGVV |
| | SEQ ID NO: 149 | SEQ ID NO: 159 | SEQ ID NO: 169 |
| BCMA27 | TGSRSNVGSYNDVS | DVDKRPA | SSYGGTYSLFV |
| | SEQ ID NO: 150 | SEQ ID NO: 160 | SEQ ID NO: 170 |
| BCMA28 | SGSSSNIGQNAVN | YNDLVSS | ATWDDSLNGVV |
| | SEQ ID NO: 151 | SEQ ID NO: 161 | SEQ ID NO: 171 |
| BCMA30 | RASQGISSYLA | AASTLQS | QQLNSYPPWT |
| | SEQ ID NO: 152 | SEQ ID NO: 162 | SEQ ID NO: 172 |
| BCMA31 | TGTSSDVGTYNYVS | DVNQRPS | SSYGGSNNLV |
| | SEQ ID NO: 153 | SEQ ID NO: 163 | SEQ ID NO: 173 |
| BCMA32 | TGTSSDVGGYNYVS | DVSKRPS | SSYTSSSTVV |
| | SEQ ID NO: 147 | SEQ ID NO: 164 | SEQ ID NO: 174 |
| BCMA33 | TGTSSDVGGYNYVS | EVSKRPS | SSYAGSNNFVV |
| | SEQ ID NO: 147 | SEQ ID NO: 165 | SEQ ID NO: 175 |
| BCMA34 | TGNSNNVGNQGAA | RNNNRPS | SAWDSSLSARV |
| | SEQ ID NO: 154 | SEQ ID NO: 166 | SEQ ID NO: 176 |
| BCMA35 | SGSSSNIGSNTVN | SNNQRPS | AAWDDSLNGGV |
| | SEQ ID NO: 155 | SEQ ID NO: 159 | SEQ ID NO: 177 |
| Antibody | VH CDR1 | VH CDR2 | VH CDR3 |
| BCMA21 | SYAMS | AISGSGGSTYYADSVKG | ITAMVTHNFYGMDV |
| | SEQ ID NO: 178 | SEQ ID NO: 189 | SEQ ID NO: 201 |
| BCMA22 | SSNWWS | EIYHSGSTNYNPSLKS | VGSGYSYGYGDRVLDY |
| | SEQ ID NO: 179 | SEQ ID NO: 190 | SEQ ID NO: 202 |
| BCMA23 | SYWIG | IIYPGDSDTRYSPSFQG | RGGALDY |
| | SEQ ID NO: 180 | SEQ ID NO: 191 | SEQ ID NO: 203 |
| BCMA24 | SYAIS | GIIPIFGTANYAQKFQG | GSFYSSVNV |
| | SEQ ID NO: 181 | SEQ ID NO: 192 | SEQ ID NO: 204 |
| BCMA27 | SYGMH | VISYDGSNKYYADSVKG | EEFYGDSSYGMDV |
| | SEQ ID NO: 182 | SEQ ID NO: 193 | SEQ ID NO: 205 |
| BCMA28 | SNSAAWN | RTYYRSKWYNDYAVSVKS | DYYYGMDV |
| | SEQ ID NO: 183 | SEQ ID NO: 194 | SEQ ID NO: 206 |
| BCMA30 | SYWIG | IIYPGDSDTRYSPPFQG | LDASGSQRGGMDV |
| | SEQ ID NO: 180 | SEQ ID NO: 195 | SEQ ID NO: 207 |
| BCMA31 | SYWMS | NIKPDGSDKYYVDSVKG | GATTYGS |
| | SEQ ID NO: 184 | SEQ ID NO: 196 | SEQ ID NO: 208 |
| BCMA32 | RYAIS | GIIPFFGTSDYAQKFQG | RVATTGTGFYYAMDV |
| | SEQ ID NO: 185 | SEQ ID NO: 197 | SEQ ID NO: 209 |
| BCMA33 | DYAMH | GISWNSGSIGYADSVKG | VGASAALGAFDI |
| | SEQ ID NO: 186 | SEQ ID NO: 198 | SEQ ID NO: 210 |
| BCMA34 | NPFVH | IINLSGGDTLYAQKFQG | DQAGFGDSAY |
| | SEQ ID NO: 187 | SEQ ID NO: 199 | SEQ ID NO: 211 |
| BCMA35 | SYDIS | WINAYNGNANYAQKLQG | EYYYFWSNRAFYYGMDV |
| | SEQ ID NO: 188 | SEQ ID NO: 200 | SEQ ID NO: 212 |
| Antibody | VL CDR1 | VL CDR2 | VL CDR3 |
| C1 | TGTSSDIGAYNYVS | DVSHRPS | SSDTNNNTLV |
| | SEQ ID NO: 263 | SEQ ID NO: 293 | SEQ ID NO: 321 |
| C2 | SGSSSNIGNNYVS | DNNKRPS | VTWDTSLSAGV |
| | SEQ ID NO: 277 | SEQ ID NO: 305 | SEQ ID NO: 335 |
| C3 | RASQGIGTYLA | AASNLOS | QQYKGYPLT |
| | SEQ ID NO: 267 | SEQ ID NO: 297 | SEQ ID NO: 326 |
| C4 | SGSSSNIGSNYVN | RNNQRPS | AAWDDSLSGHGV |
| | SEQ ID NO: 278 | SEQ ID NO: 292 | SEQ ID NO: 336 |
| C5 | TRSSGSIAGSYVQ | QDNQRPS | QSYDSNNQV |
| | SEQ ID NO: 283 | SEQ ID NO: 310 | SEQ ID NO: 342 |
| C6 | SGADLGDQYVS | EDDKRPS | QAWDGNAAI |
| | SEQ ID NO: 284 | SEQ ID NO: 311 | SEQ ID NO: 343 |
| C7 | RASQSVSSSYLA | GASSRAT | QQYGSSPLT |
| | SEQ ID NO: 268 | SEQ ID NO: 298 | SEQ ID NO: 327 |
| C8 | TGTSTDIGGYDFVS | DVSSRPS | SSYAGSGTWM |
| | SEQ ID NO: 264 | SEQ ID NO: 294 | SEQ ID NO: 322 |
| C9 | SGSNSNIENNYVY | QNNQRPS | SAWDDSLSAWV |
| | SEQ ID NO: 285 | SEQ ID NO: 312 | SEQ ID NO: 344 |
| C10 | GGNNIGSKSVH | DDSDRPS | QVWDSSSDHWV |
| | SEQ ID NO: 286 | SEQ ID NO: 313 | SEQ ID NO: 345 |
| C11 | SGSSSNIGSNYVY | RNNQRPS | AAWDDSLSGYV |
| | SEQ ID NO: 262 | SEQ ID NO: 292 | SEQ ID NO: 320 |
| C12 | SGSSSNIGNNYVS | DDNKRPS | SAWDDSLSGYV |
| | SEQ ID NO: 277 | SEQ ID NO: 306 | SEQ ID NO: 337 |
| C13 | RSSQGLVFSDGVTYLN | KVSNRDS | MQGTHWPHT |
| | SEQ ID NO: 287 | SEQ ID NO: 314 | SEQ ID NO: 346 |
| C14 | QASQDITNYLN | DASNLET | QQYDDLPLT |
| | SEQ ID NO: 269 | SEQ ID NO: 299 | SEQ ID NO: 328 |
| C15 | RASQSISSWLA | KTSALED | LHYGSYT |
| | SEQ ID NO: 270 | SEQ ID NO: 300 | SEQ ID NO: 329 |
| C16 | SGSSSNIEGNTVS | SNSYRAS | SAWDDSLNGPV |
| | SEQ ID NO: 282 | SEQ ID NO: 309 | SEQ ID NO: 341 |
| C17 | TGTSSDVGTYDYVS | DVTYRPS | QQYNNWPPRYT |
| | SEQ ID NO: 265 | SEQ ID NO: 295 | SEQ ID NO: 323 |
| C18 | TGTSSDVGGYNYVS | DVSNRPS | SSYTSSSTLFV |
| | SEQ ID NO: 261 | SEQ ID NO: 290 | SEQ ID NO: 324 |
| C19 | RASQDIRHDLG | ATSTLQS | LQDGDYPLT |
| | SEQ ID NO: 271 | SEQ ID NO: 301 | SEQ ID NO: 330 |
| C20 | TGTSSDVGGYNYVS | EVSERPS | SSYAGSNILV |
| | SEQ ID NO: 261 | SEQ ID NO: 291 | SEQ ID NO: 319 |
| C21 | SGSSSNVGGNPVY | GHNQRPP | AAWDDSLSGWV |
| | SEQ ID NO: 279 | SEQ ID NO: 307 | SEQ ID NO: 338 |
| C22 | GANNIETKSVH | YDSDRPS | QVWDSTSDHVV |
| | SEQ ID NO: 288 | SEQ ID NO: 315 | SEQ ID NO: 347 |
| C23 | QASQDISNYLN | DASNLET | QQYGNLPLT |
| | SEQ ID NO: 272 | SEQ ID NO: 299 | SEQ ID NO: 331 |
| C24 | RASQSISSYLN | AASSLOS | LQYKTYPYT |
| | SEQ ID NO: 273 | SEQ ID NO: 302 | SEQ ID NO: 332 |
| C25 | TGTSSDVGGYNYVS | DVSNRPS | SSYTSSSTWV |
| | SEQ ID NO: 261 | SEQ ID NO: 290 | SEQ ID NO: 317 |
| C26 | SGSRSNIGSNTVS | LNNQRPS | ATWDDDLNGV |
| | SEQ ID NO: 280 | SEQ ID NO: 308 | SEQ ID NO: 339 |
| C27 | RASQRVSATYLA | GGSRRAT | QQYGSSPLT |
| | SEQ ID NO: 274 | SEQ ID NO: 303 | SEQ ID NO: 327 |
| C28 | TGTSSDVGGYNYVS | DVSNRPS | SSYTSSSNWV |
| | SEQ ID NO: 261 | SEQ ID NO: 290 | SEQ ID NO: 318 |
| C29 | SGSSSNIGSNYVY | RNNQRPS | AAWDDSLSGYV |
| | SEQ ID NO: 262 | SEQ ID NO: 292 | SEQ ID NO: 320 |
| C30 | QASQNINNYLN | DASNLEA | QQNDNLPLT |
| | SEQ ID NO: 275 | SEQ ID NO: 304 | SEQ ID NO: 333 |
| C31 | SGGNSNIGDNSVS | NNNQRPL | SSWDDSLEGAQ |
| | SEQ ID NO: 289 | SEQ ID NO: 316 | SEQ ID NO: 348 |
| C32 | SGSSSNIEGNTVS | SNSYRAS | SAWDDSLNGPV |
| | SEQ ID NO: 282 | SEQ ID NO: 309 | SEQ ID NO: 341 |
| C33 | RASQDISSWIA | AASSLOS | QQGSTFPLA |
| | SEQ ID NO: 276 | SEQ ID NO: 302 | SEQ ID NO: 334 |
| C34 | TGTRSDVGAYNYVS | DVSKRPS | SSYAGSGKYV |
| | SEQ ID NO: 266 | SEQ ID NO: 296 | SEQ ID NO: 325 |
| C35 | SGSSPNIGNNYVS | DNNKRPS | GTWDSRLNIWV |
| | SEQ ID NO: 281 | SEQ ID NO: 305 | SEQ ID NO: 340 |
| Antibody | VH CDR1 | VH CDR2 | VH CDR3 |
| C1 | SYGMH | VIWYDGSNKYYADSVKG | DRDGFFLPMYYFDY |
| | SEQ ID NO: 351 | SEQ ID NO: 372 | SEQ ID NO: 396 |
| C2 | NAWMS | RIKSKTDGGTTDYAAPVKG | DPHGYYYGMDV |
| | SEQ ID NO: 349 | SEQ ID NO: 382 | SEQ ID NO: 409 |
| C3 | SYAIS | GIIPIFGTANYAQKFQG | DSGWFGPRYYFDY |
| | SEQ ID NO: 355 | SEQ ID NO: 376 | SEQ ID NO: 400 |
| C4 | RYYMN | AIDPSDGDTTYGQKFQG | DWELTNSYGLDV |
| | SEQ ID NO: 360 | SEQ ID NO: 383 | SEQ ID NO: 410 |
| C5 | DYGMS | GINWNGGRTGYADSVKG | ARGSGSYFGYMDV |
| | SEQ ID NO: 359 | SEQ ID NO: 389 | SEQ ID NO: 417 |
| C6 | RYSMN | YISSSSSTIYYADSVKG | DGYGGNSDYYGMDV |
| | SEQ ID NO: 366 | SEQ ID NO: 388 | SEQ ID NO: 418 |
| C7 | SYGIS | WISAYNGNTNYAQKLQG | DPYDDYGGNSRDEEDAFDI |
| | SEQ ID NO: 356 | SEQ ID NO: 377 | SEQ ID NO: 401 |
| C8 | NAWMS | RIKSKTDGGTTDSAAPVKG | YYFYSSGDMTDY |
| | SEQ ID NO: 349 | SEQ ID NO: 370 | SEQ ID NO: 394 |
| C9 | DYAMN | FIRSKASGGTTDYAASVKG | ALRGYSYGLFDY |
| | SEQ ID NO: 367 | SEQ ID NO: 390 | SEQ ID NO: 419 |
| C10 | SYAIS | GIIPIFGTANYAQKFQG | EKWGYYGDYYYGMDV |
| | SEQ ID NO: 355 | SEQ ID NO: 376 | SEQ ID NO: 420 |
| C11 | DYAMS | FIRSKAYGGTTEYAASVKG | DIGYYGSGSYSPFDY |
| | SEQ ID NO: 350 | SEQ ID NO: 371 | SEQ ID NO: 395 |
| C12 | SYNIN | SISSSSSYRYYADSVKG | DKTGGYGTAFDY |
| | SEQ ID NO: 361 | SEQ ID NO: 384 | SEQ ID NO: 411 |
| C13 | SYSMN | FISHDASKKFYADSVKG | DRNWGFSDF |
| | SEQ ID NO: 365 | SEQ ID NO: 391 | SEQ ID NO: 421 |
| C14 | SSSHYWG | SIYYSGSTYYNPSLKS | RVWVWPTYGMDV |
| | SEQ ID NO: 357 | SEQ ID NO: 378 | SEQ ID NO: 402 |
| C15 | DYYIS | YISGSSTYTDFADSVKG | DRRGRFDP |
| | SEQ ID NO: 358 | SEQ ID NO: 379 | SEQ ID NO: 403 |
| C16 | SYSMN | YISSSSSTIYYADSVKG | DIYGDWDYYYYGMDV |
| | SEQ ID NO: 365 | SEQ ID NO: 388 | SEQ ID NO: 416 |
| C17 | SYYMH | LINPTNGRTTYAQKFQG | GSPPHIFDPDFDY |
| | SEQ ID NO: 352 | SEQ ID NO: 373 | SEQ ID NO: 397 |
| C18 | SGDYYWS | YIHSTGTTYYNPSLKS | GGVGTIFNY |
| | SEQ ID NO: 353 | SEQ ID NO: 374 | SEQ ID NO: 398 |
| C19 | SYGMH | VISYDGSNKYYADSVKG | DPSLIQYYYYGMDV |
| | SEQ ID NO: 351 | SEQ ID NO: 380 | SEQ ID NO: 404 |
| C20 | NAWMS | RIKSKTDGGTTDSAAPVKG | YYFYSSGDMTDY |
| | SEQ ID NO: 349 | SEQ ID NO: 370 | SEQ ID NO: 394 |
| C21 | DYAMH | GISWNSGSIGYADSVKG | GRYVDIVATINDAFDI |
| | SEQ ID NO: 362 | SEQ ID NO: 385 | SEQ ID NO: 412 |
| C22 | SYWIG | IINPSGGSTSYAQKFQG | VVTPYYPLTN |
| | SEQ ID NO: 368 | SEQ ID NO: 392 | SEQ ID NO: 422 |
| C23 | SYGIS | WISAYNGNTNYAQKLQG | DRIAAAEVYYYYGMDV |
| | SEQ ID NO: 356 | SEQ ID NO: 377 | SEQ ID NO: 405 |
| C24 | SYAIS | GIIPIFGTANYAQKFOG | DSPSGSTNYYYYYMDV |
| | SEQ ID NO: 355 | SEQ ID NO: 376 | SEQ ID NO: 406 |
| C25 | NAWMS | RIKSKTDGGTTDSAAPVKG | YYFYSSGDMTDY |
| | SEQ ID NO: 349 | SEQ ID NO: 370 | SEQ ID NO: 394 |
| C26 | NFEMN | YISATTSATSYADSVKG | VRDGYNFGYYYYYMDV |
| | SEQ ID NO: 363 | SEQ ID NO: 386 | SEQ ID NO: 413 |
| C27 | SYGIS | WISAYNGNTNYAQKLQG | DPYDDYGGNSRDEEDAFDI |
| | SEQ ID NO: 356 | SEQ ID NO: 377 | SEQ ID NO: 401 |
| C28 | NAWMS | RIKSKTDGGTTDSAAPVKG | YYFYSSGDMTDY |
| | SEQ ID NO: 349 | SEQ ID NO: 370 | SEQ ID NO: 394 |
| C29 | DYAMS | FIRSKAYGGTTEYAASVKG | DIGYYGSGSYSPFDY |
| | SEQ ID NO: 350 | SEQ ID NO: 371 | SEQ ID NO: 395 |
| C30 | DYGMS | GINWNGGSTGYADSVKG | DRAPDYGDYLQVGTTDY |
| | SEQ ID NO: 359 | SEQ ID NO: 381 | SEQ ID NO: 407 |
| C31 | DYYMS | YISSSGSTIYYADSVKG | GHQYYDFWSGYSNWFDP |
| | SEQ ID NO: 369 | SEQ ID NO: 393 | SEQ ID NO: 423 |
| C32 | SYAMN | DISSSSSYIYYADSVKG | DLYSGYDYGYYYGMDV |
| | SEQ ID NO: 364 | SEQ ID NO: 387 | SEQ ID NO: 415 |
| C33 | SYAIS | GIIPIFGTANYAQKFOG | GLDNWNDVGWFDP |
| | SEQ ID NO: 355 | SEQ ID NO: 376 | SEQ ID NO: 408 |
| C34 | DTWMS | RIKSKTDGGTTNYAAPVKG | GDYPLFAY |
| | SEQ ID NO: 354 | SEQ ID NO: 375 | SEQ ID NO: 399 |
| C35 | NAWMS | RIKSKTDGGTTDYAAPVKG | EAAGFYYYYYGMDV |
| | SEQ ID NO: 349 | SEQ ID NO: 382 | SEQ ID NO: 414 |

TABLE 4
Corresponding relationship between sequences and SEQ ID NO.

| SEQ | Amino acid | SEQ | Amino acid | SEQ | Amino acid |
|---|---|---|---|---|---|
| ID NO | sequence | ID NO | sequence | ID NO | sequence |
| 86 | M6 VL | 106 | M13 VH | 126 | M27 scFv |
| 87 | M7 VL | 107 | M15 VH | 127 | M28 scFv |
| 88 | M8 VL | 108 | M20 VH | 128 | M31 scFv |
| 89 | M10 VL | 109 | M22 VH | 129 | M32 scFv |
| 90 | M12 VL | 110 | M24 VH | 130 | M37 scFv |
| 91 | M13 VL | 111 | M27 VH | 131 | M6 CAR |
| 92 | M15 VL | 112 | M28 VH | 132 | M7 CAR |
| 93 | M20 VL | 113 | M31 VH | 133 | M8 CAR |
| 94 | M22 VL | 114 | M32 VH | 134 | M10 CAR |
| 95 | M24 VL | 115 | M37 VH | 135 | M12 CAR |
| 96 | M27 VL | 116 | M6 scFv | 136 | M13 CAR |
| 97 | M28 VL | 117 | M7 scFv | 137 | M15 CAR |
| 98 | M31 VL | 118 | M8 scFv | 138 | M20 CAR |
| 99 | M32 VL | 119 | M10 scFv | 139 | M22 CAR |
| 100 | M37 VL | 120 | M12 scFv | 140 | M24 CAR |
| 101 | M6 VH | 121 | M13 scFv | 141 | M27 CAR |
| 102 | M7 VH | 122 | M15 scFv | 142 | M28 CAR |
| 103 | M8 VH | 123 | M20 scFv | 143 | M31 CAR |
| 104 | M10 VH | 124 | M22 scFv | 144 | M32 CAR |
| 105 | M12 VH | 125 | M24 scFv | 145 | M37 CAR |
| 213 | BCMA21 | 229 | BCMA27 | 245 | BCMA32 |
| | VL | | VH | | scFv |
| 214 | BCMA22 | 230 | BCMA28 | 246 | BCMA33 |
| | VL | | VH | | scFv |
| 215 | BCMA23 | 231 | BCMA30 | 247 | BCMA34 |
| | VL | | VH | | scFv |
| 216 | BCMA24 | 232 | BCMA31 | 248 | BCMA35 |
| | VL | | VH | | scFv |
| 217 | BCMA27 | 233 | BCMA32 | 249 | BCMA21 |
| | VL | | VH | | CAR |
| 218 | BCMA28 | 234 | BCMA33 | 250 | BCMA22 |
| | VL | | VH | | CAR |
| 219 | BCMA30 | 235 | BCMA34 | 251 | BCMA23 |
| | VL | | VH | | CAR |
| 220 | BCMA31 | 236 | BCMA35 | 252 | BCMA24 |
| | VL | | VH | | CAR |
| 221 | BCMA32 | 237 | BCMA21 | 253 | BCMA27 |
| | VL | | scFv | | CAR |
| 222 | BCMA33 | 238 | BCMA22 | 254 | BCMA28 |
| | VL | | scFv | | CAR |
| 223 | BCMA34 | 239 | BCMA23 | 255 | BCMA30 |
| | VL | | scFv | | CAR |
| 224 | BCMA35 | 240 | BCMA24 | 256 | BCMA31 |
| | VL | | scFv | | CAR |
| 225 | BCMA21 | 241 | BCMA27 | 257 | BCMA32 |
| | VH | | scFv | | CAR |
| 226 | BCMA22 | 242 | BCMA28 | 258 | BCMA33 |
| | VH | | scFv | | CAR |
| 227 | BCMA23 | 243 | BCMA30 | 259 | BCMA34 |
| | VH | | scFv | | CAR |
| 228 | BCMA24 | 244 | BCMA31 | 260 | BCMA35 |
| | VH | | scFv | | CAR |
| 424 | C1 VL | 460 | C2 VH | 496 | C11 CAR |
| 425 | C2 VL | 461 | C3 VH | 497 | C1 scFv |
| 426 | C3 VL | 462 | C4 VH | 498 | C2 scFv |
| 427 | C4 VL | 463 | C5 VH | 499 | C3 scFv |
| 428 | C5 VL | 464 | C6 VH | 500 | C4 scFv |
| 429 | C6 VL | 465 | C7 VH | 501 | C5 scFv |
| 430 | C7 VL | 466 | C8 VH | 502 | C6 scFv |
| 431 | C8 VL | 467 | C9 VH | 503 | C7 scFv |
| 432 | C9 VL | 468 | C10 VH | 504 | C8 scFv |
| 433 | C10 VL | 469 | C11 VH | 505 | C9 scFv |
| 434 | C11 VL | 470 | C12 VH | 506 | C10 scFv |
| 435 | C12 VL | 471 | C13 VH | 507 | C11 scFv |
| 436 | C13 VL | 472 | C14 VH | 508 | C12 scFv |
| 437 | C14 VL | 473 | C15 VH | 509 | C13 scFv |
| 438 | C15 VL | 474 | C16 VH | 510 | C14 scFv |
| 439 | C16 VL | 475 | C17 VH | 511 | C15 scFv |
| 440 | C17 VL | 476 | C18 VH | 512 | C16 scFv |
| 441 | C18 VL | 477 | C19 VH | 513 | C17 scFv |
| 442 | C19 VL | 478 | C20 VH | 514 | C18 scFv |
| 443 | C20 VL | 479 | C21 VH | 515 | C19 scFv |
| 444 | C21 VL | 480 | C22 VH | 516 | C20 scFv |
| 445 | C22 VL | 481 | C23 VH | 517 | C21 scFv |
| 446 | C23 VL | 482 | C24 VH | 518 | C22 scFv |
| 447 | C24 VL | 483 | C25 VH | 519 | C23 scFv |
| 448 | C25 VL | 484 | C26 VH | 520 | C24 scFv |
| 449 | C26 VL | 485 | C27 VH | 521 | C25 scFv |
| 450 | C27 VL | 486 | C28 VH | 522 | C26 scFv |
| 451 | C28 VL | 487 | C29 VH | 523 | C27 scFv |
| 452 | C29 VL | 488 | C30 VH | 524 | C28 scFv |
| 453 | C30 VL | 489 | C31 VH | 525 | C29 scFv |
| 454 | C31 VL | 490 | C32 VH | 526 | C30 scFv |
| 455 | C32 VL | 491 | C33 VH | 527 | C31 scFv |
| 456 | C33 VL | 492 | C34 VH | 528 | C32 scFv |
| 457 | C34 VL | 493 | C35 VH | 529 | C33 scFv |
| 458 | C35 VL | 494 | C5 CAR | 530 | C34 scFv |
| 459 | C1 VH | 495 | C7 CAR | 531 | C35 scFv |

### Example 5: Assay of Cells Transduced with CAR or Co-Transduced with CAR and a LACOSTIM

[0493] CARs targeting different targets and CARTs are constructed as described in previous Examples 3-4, unless otherwise stated.

5.1 Mesothelin CART or Mesothelin CART Co-Transduced with CAR and a LACOSTIM
5.1.1: Cytokines Production of T Cells Co-Transduced with MSLN CAR and a LACOSTIM

[0494] Lentiviral vectors co-expressing a LACOSTIM (A40C28, SEQ ID NO:600) and M12 or ss1, as well M12, M32 or ss1 CAR alone were constructed (FIG. 34A). T cells were transduced with these lentiviral vectors and the CAR expression was detected by flow cytometry (FIG. 34B). The function of the T cells transduced with the lentiviral vectors was tested by co-culturing with MSLN negative tumors PC3 expressing lower levels or higher levels MSLN (FIG. 34C Upper panel) or MSLN positive tumor lines OVCAR3 and H266 (FIG. 34C Lower panel) for the specificity and activity test. The results shown that background cytokine secretions of A40C28-M12 was slightly higher than that of M12 alone, but was lower than that of ss1 alone, when the T cells were tested on MSLN lower expressing tumors PC3 or PC3+Meso 0.5 ug. Indicating that T cells co-expressing LACO-STIM and M12 CAR is safer and more specifically recognize MSLN high expressing tumors than previously clinically used ss1 CAR.
[0495] 5.1.2: Specific Activation of Anti-Mesothelin CART Cells and LACO-Expressing Mesothelin CART Cells by Mesothelin-Expression Cancer Cells

[0496] CD107a is an early phase-activating marker for T cells. Activation of mesothelin CARTs by mesothelin-expressing tumor cells was measured by CD107a staining with the following procedures: 20 μl PE-CD107a mAb was added to each well of a 96-well plate; tumor cells were diluted to 2×10e6/ml and seeded on 96-well round plates (100 μl/well); CAR-T cells were diluted to 1×10e6/ml and seeded in 96-well round plates (100 μl/well); the plates were centrifuged at 500 rpm×5 min to attach cells and cultured at 37° C. for 1 hour; Golgi stop was diluted by 1500× with medium and added to each well (20 μl/well); cells were cultured at 37° C. for another 2.5 hours, stained with anti-CD3-APC and anti-CD8-FITC antibodies at 37° C. for 30 min, washed and analyze by flow cytometry.

[0497] CART cells co-expressing a LACOSTIM (e.g., A40C28; SEQ ID NO:600) were also prepared and their activation by tumor cells were confirmed by CD107a staining. Various mRNA-based CART cells were prepared, including mock T cells (NO EP), T cells with A40C28, anti-mesothelin M12 CART cells (M12 CART), M12 CART cells co-expressing A40C28 (M12+A40C28 CART), M32 CART cells, and M32+A40C28 CART cells. These cells were cocultured with various cancer cell lines (OVCAR3, H226, ASPC1, A549 and HCC70) and CD107a expression was measured by flow cytometry. As shown in FIG. 35, anti-mesothelin M12 and M32 CAR-T cells were specifically activated by OVCAR3, H226, and ASPC1 (tumor cells with high mesothelin-expression level), but not A549 and HCC70 (tumor cell lines with low or no mesothelin expression).

### 5.1.3: Tumor Killing of LACO-Expressing Mesothelin CART Cells

[0498] The tumor killing effects of the provided mesothelin CARTs cells were measured in the tumor killing assay. Various mRNA-based anti-mesothelin CAR-T cells, including mock T cells (NO EP), T cells with A40C28, anti-mesothelin M12 CART cells, M12 CART cells co-expressing A40C28, M32 CART cells, and M32 CART cells co-expressing A40C28 were co-cultured with A549-GFP tumor cells that were electroporated with 0, 0.5 μg and 10 μg mesothelin mRNA at E/T ratio=3:1. As shown in FIG. 36, anti-mesothelin scFv-M12 and -M32 CART cells had low killing effect toward the A549 tumor cells with low mesothelin expression (0.5 μg group) and strong killing effect toward A549 tumor cells with high mesothelin expression (10 μg group), while A40C28 greatly improved the killing efficiency of CART cells to mesothelin-expressing tumor cells.

[0499] Lentivirus-based CART cells were generated using the following procedures: T cells were isolated from PBMC and activated by anti-CD3/CD28 beads (T cell:beads=1:3). At day 1, the activated T cells were transduced with lentivirus at a multiplicity of infection (MOI) of 3. At day 7, the transduction efficiency of T cell was evaluated by FACS staining. Generally, the transduction efficiency was between 10% to 70%. The CART cells were cultured up to day 14, which were used for functional study immediately or frozen and stored using liquid nitrogen.

[0500] The tumor killing effects of the lentivirus-based anti-mesothelin CART cells were measured. CART cells including mock T cells (UTD), M12 CART cells, M12+A40C28 CART cells were co-cultured with different cancer cells, including H226, OVCAR3 and MOLM14 that electroporated with 0 or μg ug mesothelin mRNA at E/T ratio=2:1. As shown in FIG. 37, both M12 CART cells and M12+A40C28 CART cells showed strong killing effects toward mesothelin-expressing cancer cells, and the co-expression of A40C28 greatly improved the killing efficiency.

[0501] A second molecule LACOSTIM (1412-4D11, SEQ ID NO: 813) was also prepared and used in the studies. Various mRNA-based anti-mesothelin CART cells were prepared, including mock T cells (NO EP), M12 CART cells, M12+1412-4D11 CART cells, M32 CART cells, and M32+1412-4D11 CART cells. These CART cells were co-cultured with A549-GFP tumor cells that were electroporated with 0 or 2 μg mesothelin mRNA at E/T ratio=10:1. As shown in FIG. 38, both M12 and M32 CART cells demonstrated effective killing toward the mesothelin-expressing A549 tumor cells (2 μg group), and the co-expression of 1412-4D11 greatly improved the killing efficiency of the CART cells.

5.1.4: Lytic Activity of T Cells Co-Transduced with MSLN CAR and a LACOSTIM

[0502] The function of the T cells transduced with the lentiviral vectors was also tested for their killing ability against tumor cell lines expressing MSLN at different levels (0.2 ug MSLN RNA transferred PC3 or MOLM14, 10 ug MSLN RNA transferred PC3 or MOLM14, MSLN positive tumor OVCAR3 and H226). As shown in FIG. 39, For MSLN negative tumors PC3 or MOLM14, M12 and M12-A40C28 showed less background killings than M32 CAR, ss1 CAR and ss1 CAR+A40C28. For lower MSLN expressing tumor PC3+0.5 ug MSLN and MOLM14+0.5 ug MSLN, M12 and M12-A40C28 also shown much less background killings than M32 CAR, ss1 CAR and ss1 CAR+A40C28. While for MSLN high expressing tumors, M12+A40C28 shown effective tumor killing, albeit less effective than ss1 or ss1+A40C28. Therefore, M12+A40C28 CAR showed better safety profile than ss1 CAR.

### 5.1.5: Effective Killing of a Variety of Tumor Cells by Mesothelin CARTs

[0503] The tumor killing effects of the mesothelin CART cells were further confirmed in additional tumor cells. The mesothelin expression and CD40 expression in tumor cells (OVCAR3, H226, ASPC1, A549, HCC70, 786-0 and Jeko1) were measured by FACS staining using isotype control, anti-mesothelin mAb and anti-CD40 mAb. As shown in FIG. 40, OVCAR3, H226 and ASPC1 expressed mesothelin at high levels; A549, HCC70, 786-0 and Jeko1 expressed mesothelin at low levels. Also, OVCAR3, 786-0 and Jeko1 expressed CD40 at high levels, while H226, A549, HCC70 and ASPC1 expressed CD40 at low or no expression level.

[0504] Various mRNA-based anti-mesothelin CART cells, including mock T cells (NO EP), T cells with A40C28 alone, T cells with 1412-4D11 alone, M12 CART cells, M12+A40C28 CART cells, M12+1412-4D11 CART cells, M32 CART cells, M32+A40C28 CART cells, and M32+1412-4D11 CAR-T cells, were separately cocultured with OVCAR3, H226, ASPC1, A549, HCC70, 786-0 or Jeko1 tumor cell lines. As shown in CD107a staining results provided in FIG. 41, anti-mesothelin M12 and M32 CART cells were specifically activated by tumor cells with high mesothelin-expression level, but not tumor cell lines with low or no mesothelin expression. Both A40C28 and 1412-4D11 significantly improved the killing efficiency of CART cells against mesothelin and/or CD40 expressing tumor cells.

[0505] As further shown in the killing curves on FIG. 42, various mRNA-based anti-mesothelin CART cells, including mock T cells (NO EP), M12 CART cells, M12+A40C28 CART cells, M12+1412-4D11 CAR-T cells, M32 CART cells, M32+A40C28 CART cells, and M32+1412-4D11 CART cells were separately cocultured with OVCAR3-GFP, H226-GFP or ASPC1 tumor cells at E/T ratio=3:1. As shown, anti-mesothelin scFv-M12 and -M32 CART cells had moderate killing effect toward mesothelin overexpressing A549 tumor cells, and co-expression of either 1412-4D11 or A40C28 greatly improved the killing efficiency of these mesothelin CART cells against mesothelin and/or CD40 expression tumor cells.

[0506] IFN-γ and IL2 release was detected by ELISA in the CART killing assay. Various mRNA-based anti-mesothelin CART cells, including mock T cells (NO EP), M12 CART cells, M12+A40C28 CART cells, M12+1412-4D11 CART cells, M32 CART cells, M32+A40C28 CART cells, and M32+1412-4D11 CAR-T cells, were separately cocultured with OVCAR3-GFP, H226-GFP or ASPC1 tumor cells at E/T ratio=1:1. As shown in FIG. 43, co-expression with LACO, either A40C28 or 1412-4D11, significantly enhanced the release of IFN-γ and IL2 by the CART cells when stimulated by all tested cancer cells.

5.1.6: Specificity Test of T Cells Co-Transduced with MSLN CAR and a LACOSTIM

[0507] The expression of MLSN or CD40 of a panel of tumors was examined by flow cytometry (FIG. 44A). T cells transduced with the lentiviral vectors were stimulated with tumor cell lines expressing MSLN and CD40 at different levels and CD137 upregulation was examined by flow cytometry. It was found that M12 or A40C28-M12 CART cells were only reactive to MSLN high expression tumor OVCAR3 and H266, while the background activity of ss1 or ss1-A40C28 CART cells against some of MSLN low expressing tumors was higher than the M12 based CART cells (FIG. 44B).

### 5.1.7: Anti-Tumor Efficacy of A40C28-M12 LVV CART in H226 Xenograft NOG Tumor Model

[0508] To verify the anti-tumor potency and efficacy of A40C28-M12 lentiviral vector (LVV) CART in vivo, the NSG mice were subcutaneously injected (s.i.) with the 5E6 H226 tumor cells transduced with click beetle green (H226-CBG). 11 days later, mice were infused with 1E6 or 5E6 CAR positive T cells (i.v.) as indicated (FIG. 45A-45B). Tumor volumes (FIG. 45C) and average radiance of Bioluminescence (FIG. 45D) were measured at different time points. The results showed that both M12 CAR and A40C28-M12 CAR groups at 5M do control tumor growth efficiently, with A40C28-M12 CAR slightly more efficient than M12 CAR alone. At 1M dose, A40C28-M12 CART slightly and transiently controlled the tumor growth, whereas M12 failed to control tumor growth as non-transduced T cells (UTD) and A40C28 alone groups.

### 5.1.8: Anti-Tumor Efficacy of A40C28-M12 LVV CART in H226 Xenograft NOG Tumor Model

[0509] Tumor-infiltrating lymphocytes (TILs), located in the tumor microenvironment, are the fundamental elements of the specific immunological response against tumor cells and have prognostic importance in many types of cancer. To discovery the influence of A40C28 LACOSTIM on the TILs, TILs were isolated from the mice that were treated for 2 weeks (FIG. 46A). Distribution of CD4+ T cell, CD8+ T cell, Granzyme B+ T cell and MSLN+ target cells in tumor tissue were detected by multiplexed immunohistochemical (mIHC) (FIG. 46B). The results indicated that A40C28 LACO promote TIL (CD4+ and CD8+) infiltration and/or proliferation in treated H226-xenograft model (FIG. 46C).

5.2 BCMA CART or BCMA CART Co-Transduced with CAR and a LACOSTIM

### 5.2.1: Expression of BCMA by Tumor Cells

[0510] As shown in FIGS. 47A and 47B, different tumor cell lines were examined for the expression of BCMA by FACS staining (FIG. 47A) and RT-PCR (FIG. 47B). BCMA expression was detected in Jeko-1 (low level), Raji (intermediate level) and RPMI-8226 cells (high level) by FACS staining. Although BCMA expression was not detected in Nalm6 by FACS, RT-PCR analysis showed it was expressed, albeit at a very low level.

### 5.2.2: BCMA CART Showed Cytotoxicity Against Tumor Cells

[0511] The CART cells were cocultured with Jeko-1 cells and RPMI-8226 tumor cells. The production of INF-γ and IL-2 were examined. As shown in FIGS. 48A (INF-γ) and 48B (IL-2), of the 12 CARTs that we generated, BCMA23 (#5; SEQ ID NO:251), BCMA24 (#6; SEQ ID NO:252), BCMA27 (#7; SEQ ID NO:253), BCMA31 (#10; SEQ ID NO:256), and BCMA33 (#12; SEQ ID NO:258) produced more cytokines than the others, including NBC10 and B38M CAR T cells.

[0512] We also examined the cytolytic activities of the CART cells against Jeko-1 (FIGS. 49A-49D) and RPMI-8226 cells (FIGS. 50A-50E), respectively. BCMA23 (#5), BCMA24 (#6), BCMA31 (#10), and BCMA33 (#12) CART cells showed different levels of cytotoxicity against Jeko-1 cells, with BCMA31 (#10) being the highest, which efficiently eliminated Jeko-1 (FIGS. 49C-49D). Additionally, BCMA21 (#3; SEQ ID NO:249), BCMA22 (#4; SEQ ID NO:250), BCMA23 (#5; SEQ ID NO:251), BCMA24 (#6; SEQ ID NO:252), BCMA27 (#7; SEQ ID NO:253), BCMA31 (#10; SEQ ID NO:256), BCMA33 (#12; SEQ ID NO:258), BCMA34 (#13; SEQ ID NO:259), and BCMA35 (#14; SEQ ID NO:260) showed different levels of cytotoxicity against RPMI-8226 cells, of which BCMA21 (#3), BCMA23 (#5), BCMA24 (#6), BCMA27 (#7), BCMA31 (#10), and BCMA33 (#12) efficiently eliminated RPMI-8226 cells.

### 5.2.2: Armored BCMA31 CAR T Cells Showed Superior Anti-Tumor Activities

[0513] LACO (e.g., A40C.CD28 as used in this study) is a switch receptor that can engage CD40 antigen and then activate CD28 signaling in T cells. In this study, LACO-BCMA31 CART cells, BCMA31 CAR T cells and B38M CAR T were generated as follows. First, lentiviruses were generated and transduced to T cells to express BCMA31.BBz (SEQ ID NO:256), LACO-BCMA31.BBz (SEQ ID NO:601), and B38M.BBz. As shown in FIGS. 51A-51B, the expression level of B38M.BBz was the highest. The expression level of BCMA31.BBz in the LACO-BCMA31.BBz construct was lower than that of BCMA31.BBz-only construct. Also, the expansion of LACO-BCMA31 CART was much faster than that of BCMA31 CART and B38M CART (FIG. 52A), and the size of BCMA31 and B38M CART cells were larger than LACO-BCMA31 and NTD T cells (FIG. 52B).

[0514] We cocultured these T cells with a panel of tumor cells and examined the production of INF-γ and IL-2 by the T cells. LACO-BCMA31 T cells produced significantly more IL-2 than other T cell types when cocultured with Jeko-1 and Raji (FIG. 53A). LACO-BCMA31 T cells also produced significantly more INF-γ than other T cell types when cocultured with Nalm6, Jeko-1 and Raji (FIG. 53B).

[0515] We evaluated the function of these CAR T cells in vivo. Jeko-1 tumor cells were established in NSG mice by intravenous injection. Nine days later, T cells were injected intravenously. Bioluminescence imaging showed that BCMA31 (SEQ ID NO:256), LACO-BCMA31 (SEQ ID NO:601), BCMA31-LACO (SEQ ID NO:602), and B38M T cells significantly reduced tumor growth. LACO-BCMA31 and BCMA31-LACO T cells had the greatest anti-tumor effect (FIGS. 55A-54C).

[0516] Next, we electroporated BCMA31.BBz, LACO, or both BCMA31.BBz and LACO mRNA into T cells for transient expression. The expression of CAR and LACO in the T cells was shown in FIG. 55 and Table 5 below.

TABLE 5
T cells electroporated with mRNA products

| | | BCMA | CAR | LACO | LACO |
|---|---|---|---|---|---|
| | Constructs | CAR % | MFI | % | MFI |
| 1 | BCMA31.BBz (10 μg) | 91.3% | 2238 | | |
| 2 | A40C.CD28 (10 μg) | | | 95.8% | 1244 |
| 3 | A40C.CD28-BCMA31.BBz | 90.5% | 2766 | 95.8% | 1234 |
| | (10 μg + 10 μg) | | | | |
| 4 | NTD | | | | |

[0517] We cocultured T cells with different tumor cells for four hours and then examined the activation of the T cells by tumor cells. CD107a were strongly activated in the BCMA31 T cells and BCMA31+LACO T cells when they were cocultured with BCMA+ tumor cells, including Nalm6, Jeko-1, RPMI-8226, and Raji (FIG. 56).

[0518] The cytotoxic T cell activities against the tumor cells were further confirmed by Incucyte Live-Cell Analysis System. BCMA31 T cells and BCMA+LACO T cells effectively controlled the growth of BCMA+ tumor cells compared with NTD and LACO alone T cells (FIGS. 57A-57D).

5.3 CD123 CART or CD123 CART Co-Transduced with CAR and a LACOSTIM

### 5.3.1: CD107a Staining of CART Cells.

[0519] The CD123 expression by various tumor cell lines were measured by FACS staining. FIG. 58 shows the FACS staining of A549, SK-OV3, Jeko-1, Molm-14, SupT-1, 293T, Nalm-6 and PC-3 cells with PE-isotype control and PE-anti-CD123 mAb. As shown, most tested tumor cell lines did not express CD123, with only Molm-14 expressing CD123 at a relatively high level.

[0520] CD107a is an early phase-activating marker for T cells. Activation of CD123 CARTs by CD123-expressing tumor cells was measured by CD107a staining with the following procedures: 20 μl PE-CD107a mAb was added to each well of a 96-well plate; tumor cells were diluted to 2×10e6/ml and seeded in 96-well round plates (100 μl/well); CART cells were diluted to 1×10e6/ml and seeded in 96-well round plates (100 μl/well); the plates were centrifuged at 500 rpm×5 min to attach cells well and cultured at 37° C. for 1 hour; Golgi stop was diluted by 1500× with medium and added to each well (20 μl/well); cells were cultured at 37° C. for another 2.5 hours, stained with anti-CD3-APC and anti-CD8-FITC antibodies at 37° C. for 30 min, washed and analyze by flow cytometry.

[0521] In our studies, activation of CARTs (expressing anti-CD123-C5, anti-CD123-C7, anti-CD123-C11) by CD123-expressing tumor cells was measured by CD107a staining. Tested cells including A549 electroporated with 10 μg, 0.1 μg and 0 μg CD123 mRNA, SK-OV3, PC-3, cord blood derived CD34+ hematopoietic stem cells (CD34+ cord), bone marrow derived hematopoietic stem cells (CD34+M), Molm-14, Nalm6, Jeko-1 tumor cell lines and fresh isolated patient AML tumor cells (CD123+). As shown in FIG. 59, CART cells expressing anti-CD123-C5, -C7 and -C11 were specifically activated by tumor cells having relatively high CD123 expression, especially the CD123+ AML tumor cells, but not tumor cell lines with low CD123 expression. These results indicated that CD123 expression by tumor cells could activate CD123 CARTs.

### 5.3.2: Tumor Killing of LACO-Expressing CD123 CART Cells

[0522] The cytolytic activities of the provided CD123 CARTs cells were measured in the tumor killing assay. LACOSTIM A40C28 was used in this study. Various mRNA-based anti-CD123 CART cells, including mock T cells (NO EP), T cells expressing C5 CAR (SEQ ID NO:494), C5 CAR with A40C28 (SEQ ID NO:600), C7 CAR (SEQ ID NO:495), C7 CAR with A40C28, C11 CAR (SEQ ID NO:496), and C11 CAR with A40C28, were co-cultured with tumor cells Molm-14, Nalm6, Jeko-1, at E/T ratio=10:1. As shown in FIG. 60, the co-expression of LACO (A40C28) improved the killing efficiency of provided CART cells against all tumor cells.

[0523] The cytolytic activity of the provided CD123 CARTs cells was further examined in A549 cells electroporated with 0, 0.1 μg or 10 μg CD123 mRNA. As shown in FIG. 62, the ectopic expression levels of CD123 in A549 cells correlated with cytolytic activities of the CD123 CARTs against such tumors. Again, the co-expression of LACO consistently enhanced the anti-tumor effects of the CART cells (FIG. 61).

[0524] IFN-γ release was detected by ELISA in the CART killing assays. As shown in FIG. 62, CD123 expressing cancer cells, such as MOLM14 cells, and especially AML cells (patient-001), promoted the release of IFN-γ by the CART cells; and the co-expression of LACO (A40C28) further enhanced such release.

### Example 6: CD40 LACO

### 6.1 Preparation of Anti-Human CD40 Monoclonal Antibodies

[0525] Anti-CD40 antibodies were prepared using fully human antibody phage display library following the steps below: (1) Expression and purification of phage display library; (2) Selection of CD40-specific scFv-phages; (3) mpELISA screening: after three round selection, positive colonies were selected for monoclonal phage ELISA (mpELISA) screening. Phage supernatant was generated from individual bacterial clones and tested for the binding to CD40-6His protein. The supernatant was incubated with pre-blocked Maxisorp plate coated with 2 g/ml CD40-6His protein. After three washes, 100 μl/well of HRP-conjugated anti-M13 antibody diluted 1:5000 in blocking buffer (5% milk+1% BSA in 1×PBS) was added and incubate for 60 min at RT. After washing plate 5 times with PBST, 100 μl/well TMB substrate solution was added and incubated for 10-30 min until blue color had appeared. Reaction was stopped by adding 50 μl/well of stop solution (2N H2SO4). Absorbance was read at 450 nm in a microplate reader. FIG. 63 shows five representative 96-well plates of anti-human CD40-Fc monoclonal phage ELISA.

[0526] Cloning and sequence analysis: A total of 56 positive clones were selected according to the ELISA results, and used as templates for PCR cloning of the scFv sequence. The CDR regions of scFv were analyzed through abysis website (http://abysis.org/) according to Kabat numbering scheme, and are provided in list of SEQ ID NOs: 828-863.

6.2 Preparation of CD40 scFv-CD28 Fusion (LACO)

[0527] The CD40 scFv-CD28 fusion was synthesized by Sangon Biotech (Shanghai, China). Next, the pUC57-CAR plasmid was linearized by digestion with Spe1 enzyme. The completeness of the digestion was checked by running agarose DNA gel. The linearized vector was purified using PCR Cleanup kit (#28106, QIAGEN) and eluted with EB from the kit water. The concentration of DNA was measured by nanodrop. Then, in vitro transcription (IVT) was performed following the protocol of manufacturer (Thermofisher, Cat No: AM13455). For one reaction, 1 μg template DNA, NTP/ARCA buffer, T7 buffer, GTP, T7 enzyme and Rnase free H2O were added to 0.2 ml PCR tube and incubated at 37° C. for 3 hours. 3 hours later, 2 μl Dnase was added per reaction, and incubated at 37° C. for 15 min. The tailing procedure was performed according to the manufacturer's suggestion. The IVT mRNA was purified using the Rneasy Mini kit (#74106, QIAGEN), and eluted with Rnase-free water. The concentration of RNA was measured by nanodrop. RNA integrity and size were examined by agarose gel electrophoresis.

[0528] Binding of the anti-CD40 scFv expressed on CARTs cells to CD40-Fc protein was measured by FACS staining. As shown in FIG. 64, C5, C7, C8, and C9 showed strong binding to CD40-Fc recombinant protein.

### 6.3 Tumor Cell Lines and Primary Human Lymphocytes

[0529] A549-ESO-CBG cell line was generated by using lentiviral transduction of A549 cells with Click beetle green (CBG) and EGFP, followed by lentiviral transduction of HLA-A2. Primary lymphocytes from normal donors were stimulated with anti-CD3/CD28 Dynabeads (Life Technologies) and cultured in R10 medium (RPMI-1640 supplemented with 10% FCS; Invitrogen). T cells were cryopreserved at day 10 after stimulation in a solution of 90% FCS and 10% DMSO at 1e8 cells/vial.

### 6.4 Preparation and Characterization of LACO-Expressing CART Cells

[0530] CART cells expressing LACO provided herein were prepared by electroporation with the following procedures: T cells were collected and washed with Opti-MEM medium for 3 times. The cell pellets were resuspended with Opti-MEM medium, and the cell concentration was adjusted to 5×10⁷/ml. Certain amount of RNA was aliquoted to 1.5 ml EP tube, added with 100 μl T cells (>5×10⁶ cells), and mixed gently to avoid bubbles. Electroporation was performed using BTX machine at the following parameters for T cells: 500 voltage, 0.7 ms, for one pulse. The cells were then transferred to pre-warmed culture medium and cultured at 37° C.

TABLE 6
RNA Used in this study.

| ID | RNA (10 μg each) |
|---|---|
| C4 | 40-18.28 + 4D5.BBZ |
| C5 | 40-37.28 + 4D5.BBZ |
| C6 | 40-38.28 + 4D5.BBZ |
| C7 | 40-45.28 + 4D5.BBZ |
| C8 | 40-47.28 + 4D5.BBZ |
| C9 | 40-52.28 + 4D5.BBZ |
| C11 | A40C28 + 4D5.BBZ |
| C13 | 4D5.BBZ |
| C14 | NO EP |

4D5: anti-Her2 scFv; 4D5.BBZ: anti-Her2 CAR having 4D5, 4-1BB costimulatory domain and CD3ζ signaling domain; 40-18.28: the LACOSTIM having the anti-CD40 scFv 40-18 fused with the intracellular domain of CD28 (same for the other listed LACOSTIMs 40-37.28, 40-37.28, 40-37.28, 40-37.28, 40-37.28, 40-37.28); A40C28: the LACOSTIM having anti-CD40 scFv A40C fused with the intracellular domain of CD28; NO EP: T cells without CAR.

[0531] The cytotoxicity of the LACO-expressing CART cells against tumor cells was measured in in vitro cytotoxicity assay. A549-ESO-CGB cells were adjusted to 30,000/ml and seeded to flat-bottomed 96-well plate at 3000 cells/100 μl/well. CART cells were diluted to appropriate concentration, seeded at 100 μl/well with tumor cells at different E/T ratios, such as 10:1, 3:1, 1:1, or 0.3:1. Care was taken to avoid bubbles. The co-culture plates were placed into IncuCyte S3 machine, and scanning parameters were set. After 3 days of scanning, the Total Green Object Integrated Intensity (GCU×μm² μl/well) was analyzed to calculate the killing efficiency.

[0532] As shown in FIG. 65, T cells C7, C9 or C11 showed significantly enhanced killing effect against tumor cells compared to T cells expressing Her2 CAR alone, confirming that co-expression of respective LACOSTIMs enhanced tumor killing effect of the CART cells.

### 6.5 Specific Activation of LACO-Expressing CART Cells by Cancer Cells

[0533] CD107a is an early phase-activating marker for T cells. Activation of CART cells by tumor cells was measured by CD107a staining with the following procedures: 20 μl PE-CD107a mAb was added to each well of a 96-well plate; tumor cells were diluted to 2×10⁶/ml and seeded on 96-well round plates (100 μl/well); CART cells were diluted to 1×10⁶/ml and seeded in 96-well round plates (100 μl/well); the plates were centrifuged at 500 rpm×5 min to attach cells and cultured at 37° C. for 1 hour; Golgi stop was diluted by 1500× with medium and added to each well (20 μl/well); cells were cultured at 37° C. for another 2.5 hours, stained with anti-CD3-APC and anti-CD8-FITC antibodies at 37° C. for 30 min, washed and analyze by flow cytometry.

[0534] FIGS. 66A-66C show CD107a staining of CAR-T cells in the coculture and killing assay with A549 (FIG. 66A), PC-3 (FIG. 66B), and SK-OV3 (FIG. 66C). As shown, higher percentages of T cells C7, C9 and C11 were activated by the coculture with tumor cells, confirming that co-expression of the respectively LACOSTIMs enhanced tumor-induced activation of CAR T cells.

[0535] The sequences of the screened anti-CD40 antibodies (40-18, 40-37, 40-38, 40-45, 40-47 and 40-52) and the corresponding LACOSTIMs in Example 4 shown in Table 7.

TABLE 7
(Kabat)

| SEQ ID | Amino acid |
|---|---|
| NO | sequence |
| 828 | 40-18 VL |
| | CDR1 |
| 829 | 40-37 VL |
| | CDR1 |
| 830 | 40-38 VL |
| | CDR1 |
| 831 | 40-45 VL |
| | CDR1 |
| 832 | 40-47 VL |
| | CDR1 |
| 833 | 40-52 VL |
| | CDR1 |
| 834 | 40-18 VL |
| | CDR2 |
| 835 | 40-37 VL |
| | CDR2 |
| 836 | 40-38 VL |
| | CDR2 |
| 837 | 40-45 VL |
| | CDR2 |
| 838 | 40-47 VL |
| | CDR2 |
| 839 | 40-52 VL |
| | CDR2 |
| 840 | 40-18 VL |
| | CDR3 |
| 841 | 40-37 VL |
| | CDR3 |
| 842 | 40-38 VL |
| | CDR3 |
| 843 | 40-45 VL |
| | CDR3 |
| 844 | 40-47 VL |
| | CDR3 |
| 845 | 40-52 VL |
| | CDR3 |
| 846 | 40-18 VH |
| | CDR1 |
| 847 | 40-37 VH |
| | CDR1 |
| 848 | 40-38 VH |
| | CDR1 |
| 849 | 40-45 VH |
| | CDR1 |
| 850 | 40-47 VH |
| | CDR1 |
| 851 | 40-52 VH |
| | CDR1 |
| 852 | 40-18 VH |
| | CDR2 |
| 853 | 40-37 VH |
| | CDR2 |
| 854 | 40-38 VH |
| | CDR2 |
| 855 | 40-45 VH |
| | CDR2 |
| 856 | 40-47 VH |
| | CDR2 |
| 857 | 40-52 VH |
| | CDR2 |
| 858 | 40-18 VH |
| | CDR3 |
| 859 | 40-37 VH |
| | CDR3 |
| 860 | 40-38 VH |
| | CDR3 |
| 861 | 40-45 VH |
| | CDR3 |
| 862 | 40-47 VH |
| | CDR3 |
| 863 | 40-52 VH |
| | CDR3 |
| 864 | 40-18 VL |
| 865 | 40-37 VL |
| 866 | 40-38 VL |
| 867 | 40-45 VL |
| 868 | 40-47 VL |
| 869 | 40-52 VL |
| 870 | 40-18 VH |
| 871 | 40-37 VH |
| 872 | 40-38 VH |
| 873 | 40-45 VH |
| 874 | 40-47 VH |
| 875 | 40-52 VH |
| 876 | 40-18 VL NT |
| 877 | 40-37 VL NT |
| 878 | 40-38 VL NT |
| 879 | 40-45 VL NT |
| 880 | 40-47 VL NT |
| 881 | 40-52 VL NT |
| 882 | 40-18 VH NT |
| 883 | 40-37 VH NT |
| 884 | 40-38 VH NT |
| 885 | 40-45 VH NT |
| 886 | 40-47 VH NT |
| 887 | 40-52 VH NT |
| 888 | 40-18 scFv |
| 889 | 40-37 scFv |
| 890 | 40-38 scFv |
| 891 | 40-45 scFv |
| 892 | 40-47 scFv |
| 893 | 40-52 scFv |
| 894 | 40-18.28 |
| 895 | 40-37.28 |
| 896 | 40-38.28 |
| 897 | 40-45.28 |
| 898 | 40-47.28 |
| 899 | 40-52.28 |
| 900 | 40-18.28 NT |
| 901 | 40-37.28 NT |
| 902 | 40-38.28 NT |
| 903 | 40-45.28 NT |
| 904 | 40-47.28 NT |
| 905 | 40-52.28 NT |

The application's sequence listing, which the Patent Office published only in electronic form, follows.

SEQUENCE LISTING (1019 sequences)

SEQ ID NO: 1 - protein, 11 aa, synthetic construct
  REGION 1..11: note = M6 VL CDR1
RASQSIGNSLA

SEQ ID NO: 2 - protein, 11 aa, synthetic construct
  REGION 1..11: note = M7 VL CDR1
RASQAISSALA

SEQ ID NO: 3 - protein, 11 aa, synthetic construct
  REGION 1..11: note = M8 VL CDR1
RASQSISSSLN

SEQ ID NO: 4 - protein, 11 aa, synthetic construct
  REGION 1..11: note = M10 VL CDR1
RASQSISSWLA

SEQ ID NO: 5 - protein, 11 aa, synthetic construct
  REGION 1..11: note = M12 VL CDR1
RASQGGGNYLA

SEQ ID NO: 6 - protein, 11 aa, synthetic construct
  REGION 1..11: note = M13 VL CDR1
RASQGISNSLA

SEQ ID NO: 7 - protein, 11 aa, synthetic construct
  REGION 1..11: note = M15 VL CDR1
RASQGVNSALA

SEQ ID NO: 8 - protein, 11 aa, synthetic construct
  REGION 1..11: note = M20 VL CDR1
RASQGISSAVA

SEQ ID NO: 9 - protein, 14 aa, synthetic construct
  REGION 1..14: note = M22 VL CDR1
TGTRRDIGGYEYVS

SEQ ID NO: 10 - protein, 13 aa, synthetic construct
  REGION 1..13: note = M24 VL CDR1
SGSSSNIGSNYVY

SEQ ID NO: 11 - protein, 12 aa, synthetic construct
  REGION 1..12: note = M27 VL CDR1
RASQPIVASHLA

SEQ ID NO: 12 - protein, 14 aa, synthetic construct
  REGION 1..14: note = M28 VL CDR1
SGTSSDVGGYNFVS

SEQ ID NO: 13 - protein, 14 aa, synthetic construct
  REGION 1..14: note = M31 VL CDR1
TGTSSDIGGYNSVS

SEQ ID NO: 14 - protein, 11 aa, synthetic construct
  REGION 1..11: note = M32 VL CDR1
QASEDINNSLN

SEQ ID NO: 15 - protein, 11 aa, synthetic construct
  REGION 1..11: note = M37 VL CDR1
RASQGISNYLA

SEQ ID NO: 16 - protein, 7 aa, synthetic construct
  REGION 1..7: note = M6 VL CDR2
DVSNRAT

SEQ ID NO: 17 - protein, 7 aa, synthetic construct
  REGION 1..7: note = M7 VL CDR2
DASTLES

SEQ ID NO: 18 - protein, 7 aa, synthetic construct
  REGION 1..7: note = M8\M37 VL CDR2
AASSLQS

SEQ ID NO: 19 - protein, 7 aa, synthetic construct
  REGION 1..7: note = M10 VL CDR2
KASSLES

SEQ ID NO: 20 - protein, 7 aa, synthetic construct
  REGION 1..7: note = M12 VL CDR2
GASKLQS

SEQ ID NO: 21 - protein, 7 aa, synthetic construct
  REGION 1..7: note = M13 VL CDR2
AASRLES

SEQ ID NO: 22 - protein, 7 aa, synthetic construct
  REGION 1..7: note = M15 VL CDR2
DASSLES

SEQ ID NO: 23 - protein, 7 aa, synthetic construct
  REGION 1..7: note = M20 VL CDR2
YASSLES

SEQ ID NO: 24 - protein, 7 aa, synthetic construct
  REGION 1..7: note = M22 VL CDR2
SVNNRPS

SEQ ID NO: 25 - protein, 7 aa, synthetic construct
  REGION 1..7: note = M24 VL CDR2
MNNQRPS

SEQ ID NO: 26 - protein, 7 aa, synthetic construct
  REGION 1..7: note = M27 VL CDR2
GASTRAA

SEQ ID NO: 27 - protein, 7 aa, synthetic construct
  REGION 1..7: note = M28 VL CDR2
EVSKRPS

SEQ ID NO: 28 - protein, 7 aa, synthetic construct
  REGION 1..7: note = M31 VL CDR2
GVSRRPS

SEQ ID NO: 29 - protein, 7 aa, synthetic construct
  REGION 1..7: note = M32 VL CDR2
DASDLET

SEQ ID NO: 30 - protein, 9 aa, synthetic construct
  REGION 1..9: note = M6 VL CDR3
QHRYSWPLT

SEQ ID NO: 31 - protein, 9 aa, synthetic construct
  REGION 1..9: note = M7 VL CDR3
QQADSFPLT

SEQ ID NO: 32 - protein, 9 aa, synthetic construct
  REGION 1..9: note = M8 VL CDR3
QQSYSTPLT

SEQ ID NO: 33 - protein, 9 aa, synthetic construct
  REGION 1..9: note = M10 VL CDR3
QQYYSYPLT

SEQ ID NO: 34 - protein, 9 aa, synthetic construct
  REGION 1..9: note = M12 VL CDR3
QQLNSYPVT

SEQ ID NO: 35 - protein, 9 aa, synthetic construct
  REGION 1..9: note = M13 VL CDR3
QQYYSTPFT

SEQ ID NO: 36 - protein, 9 aa, synthetic construct
  REGION 1..9: note = M15 VL CDR3
QQFSSYPLT

SEQ ID NO: 37 - protein, 9 aa, synthetic construct
  REGION 1..9: note = M20 VL CDR3
QQFNSYPLT

SEQ ID NO: 38 - protein, 11 aa, synthetic construct
  REGION 1..11: note = M22 VL CDR3
SSYSSRDTLVL

SEQ ID NO: 39 - protein, 12 aa, synthetic construct
  REGION 1..12: note = M24 VL CDR3
AARDDSLSGYVT

SEQ ID NO: 40 - protein, 8 aa, synthetic construct
  REGION 1..8: note = M27 VL CDR3
QQYGISPF

SEQ ID NO: 41 - protein, 11 aa, synthetic construct
  REGION 1..11: note = M28 VL CDR3
SSYAGRNNPYL

SEQ ID NO: 42 - protein, 10 aa, synthetic construct
  REGION 1..10: note = M31 VL CDR3
SSYGGSNNLL

SEQ ID NO: 43 - protein, 9 aa, synthetic construct
  REGION 1..9: note = M32 VL CDR3
QQLNSYPLT

SEQ ID NO: 44 - protein, 9 aa, synthetic construct
  REGION 1..9: note = M37 VL CDR3
QQYSSYPIT

SEQ ID NO: 45 - protein, 5 aa, synthetic construct
  REGION 1..5: note = M6 VH CDR1
DYYMS

SEQ ID NO: 46 - protein, 5 aa, synthetic construct
  REGION 1..5: note = M7 VH CDR1
AYWIA

SEQ ID NO: 47 - protein, 5 aa, synthetic construct
  REGION 1..5: note = M8 VH CDR1
GYAMY

SEQ ID NO: 48 - protein, 5 aa, synthetic construct
  REGION 1..5: note = M10\M24 VH CDR1
SYAMS

SEQ ID NO: 49 - protein, 5 aa, synthetic construct
  REGION 1..5: note = M12 VH CDR1
TYYIH

SEQ ID NO: 50 - protein, 5 aa, synthetic construct
  REGION 1..5: note = M13 VH CDR1
ANTIN

SEQ ID NO: 51 - protein, 5 aa, synthetic construct
  REGION 1..5: note = M15 VH CDR1
SYYMH

SEQ ID NO: 52 - protein, 5 aa, synthetic construct
  REGION 1..5: note = M20 VH CDR1
DSWIA

SEQ ID NO: 53 - protein, 5 aa, synthetic construct
  REGION 1..5: note = M22\M28 VH CDR1
SYAIS

SEQ ID NO: 54 - protein, 5 aa, synthetic construct
  REGION 1..5: note = M27 VH CDR1
DYWIG

SEQ ID NO: 55 - protein, 5 aa, synthetic construct
  REGION 1..5: note = M31 VH CDR1
SSWMA

SEQ ID NO: 56 - protein, 5 aa, synthetic construct
  REGION 1..5: note = M32 VH CDR1
GYYLH

SEQ ID NO: 57 - protein, 5 aa, synthetic construct
  REGION 1..5: note = M37 VH CDR1
PYYWT

SEQ ID NO: 58 - protein, 17 aa, synthetic construct
  REGION 1..17: note = M6 VH CDR2
YISSSGSTIYYADSVKG

SEQ ID NO: 59 - protein, 17 aa, synthetic construct
  REGION 1..17: note = M7 VH CDR2
IIYPGDSRVIYSPYFQG

SEQ ID NO: 60 - protein, 17 aa, synthetic construct
  REGION 1..17: note = M8 VH CDR2
AITTNGGSTNYADSVKG

SEQ ID NO: 61 - protein, 17 aa, synthetic construct
  REGION 1..17: note = M10\M24 VH CDR2
AISGSGGSTYYADSVKG

SEQ ID NO: 62 - protein, 17 aa, synthetic construct
  REGION 1..17: note = M12 VH CDR2
IINPSSGSTTYTQKFQG

SEQ ID NO: 63 - protein, 17 aa, synthetic construct
  REGION 1..17: note = M13 VH CDR2
RIIPSLNIRDYAQEFQG

SEQ ID NO: 64 - protein, 17 aa, synthetic construct
  REGION 1..17: note = M15 VH CDR2
IINPSGGSTSYAQKFQG

SEQ ID NO: 65 - protein, 17 aa, synthetic construct
  REGION 1..17: note = M20 VH CDR2
IIFPGDSNPIYSPSFQG

SEQ ID NO: 66 - protein, 17 aa, synthetic construct
  REGION 1..17: note = M22\M28 VH CDR2
GIIPIFGTANYAQKFQG

SEQ ID NO: 67 - protein, 17 aa, synthetic construct
  REGION 1..17: note = M27 VH CDR2
WITPNNGNTNYAPKFQG

SEQ ID NO: 68 - protein, 17 aa, synthetic construct
  REGION 1..17: note = M31 VH CDR2
NIKQDGSSQYYVDSVKG

SEQ ID NO: 69 - protein, 17 aa, synthetic construct
  REGION 1..17: note = M32 VH CDR2
IINPSGGRTSMAQKFQG

SEQ ID NO: 70 - protein, 16 aa, synthetic construct
  REGION 1..16: note = M37 VH CDR2
YIHYSGRTNYNPSLES

SEQ ID NO: 71 - protein, 11 aa, synthetic construct
  REGION 1..11: note = M6 VH CDR3
DGYRTHNWFDP

SEQ ID NO: 72 - protein, 13 aa, synthetic construct
  REGION 1..13: note = M7 VH CDR3
FGGPKFATNWFDI

SEQ ID NO: 73 - protein, 12 aa, synthetic construct
  REGION 1..12: note = M8 VH CDR3
GAPGYRGYYMDV

SEQ ID NO: 74 - protein, 9 aa, synthetic construct
  REGION 1..9: note = M10 VH CDR3
RGSSWYFDY

SEQ ID NO: 75 - protein, 10 aa, synthetic construct
  REGION 1..10: note = M12 VH CDR3
GETLRGYFDY

SEQ ID NO: 76 - protein, 14 aa, synthetic construct
  REGION 1..14: note = M13 VH CDR3
DPGSTWSPNQFFPH

SEQ ID NO: 77 - protein, 11 aa, synthetic construct
  REGION 1..11: note = M15 VH CDR3
AQRGGSVYFDY

SEQ ID NO: 78 - protein, 11 aa, synthetic construct
  REGION 1..11: note = M20 VH CDR3
HAAWGAGWFDP

SEQ ID NO: 79 - protein, 9 aa, synthetic construct
  REGION 1..9: note = M22 VH CDR3
GRSGSYGLY

SEQ ID NO: 80 - protein, 7 aa, synthetic construct
  REGION 1..7: note = M24 VH CDR3
GVATFDY

SEQ ID NO: 81 - protein, 16 aa, synthetic construct
  REGION 1..16: note = M27 VH CDR3
RGRNSSGYLYYYSMDV

SEQ ID NO: 82 - protein, 13 aa, synthetic construct
  REGION 1..13: note = M28 VH CDR3
DLGGYSYGHGLDY

SEQ ID NO: 83 - protein, 8 aa, synthetic construct
  REGION 1..8: note = M31 VH CDR3
DIWYSIDY

SEQ ID NO: 84 - protein, 11 aa, synthetic construct
  REGION 1..11: note = M32 VH CDR3
ADNWNAGSMDV

SEQ ID NO: 85 - protein, 9 aa, synthetic construct
  REGION 1..9: note = M37 VH CDR3
VGDPGLFDY

SEQ ID NO: 86 - protein, 107 aa, synthetic construct
  REGION 1..107: note = M6 VL
EIVMTQSPATLSLSPGERATLSCRASQSIGNSLAWYQQKPGQAPRLLIYDVSNRATGIPARFSGSGSGTDFTLTISSLEPEDFAVYYCQHRYSWPLTFGGGTKVEIK

SEQ ID NO: 87 - protein, 107 aa, synthetic construct
  REGION 1..107: note = M7 VL
DIRLTQSPSSLSASLGDRVTITCRASQAISSALAWYQQKPGKAPRLLIYDASTLESGVPSRFSGSGSGTDFTLTISSLQPEDFATYYCQQADSFPLTFGGGTKLEIK

SEQ ID NO: 88 - protein, 107 aa, synthetic construct
  REGION 1..107: note = M8 VL
DIQLTQSPSSLSASVGDRVTITCRASQSISSSLNWYQQKPGKAPKLLIYAASSLQSGVPSRFSGSGSGTDFTLTISSLQPEDFATYSCQQSYSTPLTFGGGTKVEIK

SEQ ID NO: 89 - protein, 107 aa, synthetic construct
  REGION 1..107: note = M10 VL
DIRMTQSPSTLSASVGDRVTITCRASQSISSWLAWYQQKPGKAPKLLIYKASSLESGVPSRFSGSGSGTEFTLTISTLQPDDFATYYCQQYYSYPLTFGGGTKVEIK

SEQ ID NO: 90 - protein, 107 aa, synthetic construct
  REGION 1..107: note = M12 VL
AIRLTQSPSLLSASVGDRVTVTCRASQGGGNYLAWYQQKPGKAPKLLIYGASKLQSGVPSRFSGSGSGTEFTLTISSLQPEDFATYYCQQLNSYPVTFGQGTKVDIK

SEQ ID NO: 91 - protein, 107 aa, synthetic construct
  REGION 1..107: note = M13 VL
AIRMTQSPSSLSASVGDRVTITCRASQGISNSLAWYQQKPGKAPKLLLYAASRLESGVPSRFSGSGSGTDYTLTISSLQPEDFATYYCQQYYSTPFTFGPGTKLEIK

SEQ ID NO: 92 - protein, 107 aa, synthetic construct
  REGION 1..107: note = M15 VL
DIQLTQSPSSLSASIGDRVTITCRASQGVNSALAWYQQKPGKPPNLLIYDASSLESGVPSRFSGSGSGRDFTLTISSLQPEDFATYYCQQFSSYPLTFGGGTKVDIK

SEQ ID NO: 93 - protein, 107 aa, synthetic construct
  REGION 1..107: note = M20 VL
AIQMTQSPSSLSASVGNRVTITCRASQGISSAVAWYQQKPGKPPKLLISYASSLESGVPSRFSGSGSGTDFSLTISSLQPEDFATYFCQQFNSYPLTFGGGTKVEIK

SEQ ID NO: 94 - protein, 111 aa, synthetic construct
  REGION 1..111: note = M22 VL
QSALTQPASVSGSPGQSITLSCTGTRRDIGGYEYVSWYQQHPGKAPKLLIFSVNNRPSGVSHRFSGSKSGNTASLTISGLQAEDEAAYFCSSYSSRDTLVLFGGGTKLTVL

SEQ ID NO: 95 - protein, 111 aa, synthetic construct
  REGION 1..111: note = M24 VL
QPVLTQPPSASGTPGQRVTISCSGSSSNIGSNYVYWYQQFPGTAPKLLIYMNNQRPSGVPDRFSGSKSGTSASLAISGLRSEDEADYYCAARDDSLSGYVTFGGGTKLTVL

SEQ ID NO: 96 - protein, 108 aa, synthetic construct
  REGION 1..108: note = M27 VL
EIVLTQSPGTLSLSPGERATLSCRASQPIVASHLAWYQHKPGQAPRLLIYGASTRAAGIPDRFSGSGSGTDFTLTISRLEPEDFAVYFCQQYGISPFTFGPGTKVDIK

SEQ ID NO: 97 - protein, 111 aa, synthetic construct
  REGION 1..111: note = M28 VL
QSALTQPPSASGSPGQSVTISCSGTSSDVGGYNFVSWYQHHPGKAPKLMIYEVSKRPSGVPDRFSGSKSGNTASLTVSGLQAEDEADYYCSSYAGRNNPYLFGTGTKLTVL

SEQ ID NO: 98 - protein, 110 aa, synthetic construct
  REGION 1..110: note = M31 VL
QSALTQPPSASGSPGQSVTISCTGTSSDIGGYNSVSWYQQHPGKAPKLIIYGVSRRPSGVPDRFSGSKSANTASLTVSGLQAVDEADYYCSSYGGSNNLLFGGGTKLTVL

SEQ ID NO: 99 - protein, 107 aa, synthetic construct
  REGION 1..107: note = M32 VL
DIRMTQSPSSLSASVGDRVTVTCQASEDINNSLNWYQQKPGKAPQLLIYDASDLETGVPSRFSGRGSGRDFTLTISSLQPEDFATYYCQQLNSYPLTFGGGTKLEIK

SEQ ID NO: 100 - protein, 107 aa, synthetic construct
  REGION 1..107: note = M37 VL
DIVMTQTPSSLSASVGDRVTITCRASQGISNYLAWFQQKPGKAPKPLIYAASSLQSGVPSKFSGSGSGTDFTLTISNLQPEDFATYICQQYSSYPITFGQGTRLEIK

SEQ ID NO: 101 - protein, 120 aa, synthetic construct
  REGION 1..120: note = M6 VH
QVQLVQSGGGLVKPGGSLRLSCAASGFTFSDYYMSWIRQAPGKGLEWVSYISSSGSTIYYADSVKGRFTISRDNAKNSLYLQMNSLRAEDTAVYYCARDGYRTHNWFDPWGQGTLVTVSS

SEQ ID NO: 102 - protein, 122 aa, synthetic construct
  REGION 1..122: note = M7 VH
QVQLVQSGAEVKKSGESLKISCKGSGYGFGAYWIAWVRQMPGKGLEWMGIIYPGDSRVIYSPYFQGQVTISADKSISTAYLQWSSLKASDTAMYYCARFGGPKFATNWFDIWGQGTTVTVSS

SEQ ID NO: 103 - protein, 121 aa, synthetic construct
  REGION 1..121: note = M8 VH
QVHLVESGGGVVQPGRSLRVSCAASGFTFSGYAMYWVRQAPGKGLEYVSAITTNGGSTNYADSVKGRFTISRDNSKNTLYLQMSSLRAGDTAVYYCARGAPGYRGYYMDVWGKGTTVTVSS

SEQ ID NO: 104 - protein, 118 aa, synthetic construct
  REGION 1..118: note = M10 VH
QVQLVQSGGGLVQPGGSLRLSCAASGFTFSSYAMSWVRQAPGKGLEWVSAISGSGGSTYYADSVKGRFTISRDNSKNTLYLQMNSLRAEDTAVYYCAKRGSSWYFDYWGQGTLVTVSS

SEQ ID NO: 105 - protein, 119 aa, synthetic construct
  REGION 1..119: note = M12 VH
EVQLVESGAEVKKPGASVKVSCKASGYTFTTYYIHWVRQAPGQGLEWMGIINPSSGSTTYTQKFQGRVTMTRDTSTSTVYIELSGLRSEDTAVYYCARGETLRGYFDYWGQGTLVTVSS

SEQ ID NO: 106 - protein, 123 aa, synthetic construct
  REGION 1..123: note = M13 VH
QVQLVQSGAEVKKPGSSVKVSCKTSADTFSANTINWVRQAPGHGLEWMGRIIPSLNIRDYAQEFQGRVTFTADESTNTVYMQLTSLRSEDTAVYYCARDPGSTWSPNQFFPHWGQGTLVTVSS

SEQ ID NO: 107 - protein, 120 aa, synthetic construct
  REGION 1..120: note = M15 VH
QVQLVQSGAEVKKPGASVKVSCKASGYTFTSYYMHWVRQAPGQGLEWMGIINPSGGSTSYAQKFQGRVTMTRDTSTSTVYMELSSLRSEDTAVYYCARAQRGGSVYFDYWGQGTLVTVSS

SEQ ID NO: 108 - protein, 120 aa, synthetic construct
  REGION 1..120: note = M20 VH
QVQLVQSGAEVRKPGESLKISCKGSGYSFRDSWIAWVRQMPGQGLEWMGIIFPGDSNPIYSPSFQGQVTISADTSISTTFLQWRSLKASDSAIYYCARHAAWGAGWFDPWGQGTLVTVSS

SEQ ID NO: 109 - protein, 118 aa, synthetic construct
  REGION 1..118: note = M22 VH
QVQLVQSGAEVKKPGSSVKVSCKASGGTFSSYAISWVRQAPGQGLEWMGGIIPIFGTANYAQKFQGRVTITADESTSTAYMELSSLRSEDTAVYYCASGRSGSYGLYWGQGTLVTVSS

SEQ ID NO: 110 - protein, 116 aa, synthetic construct
  REGION 1..116: note = M24 VH
EVHLVESGGGLVQPGGSLRLSCAASGFTFSSYAMSWVRQAPGKGLEWVSAISGSGGSTYYADSVKGRFTISRDNSKNTLYLQMNSLKTEDTAVYYCTRGVATFDYWGQGTLVTVSS

SEQ ID NO: 111 - protein, 125 aa, synthetic construct
  REGION 1..125: note = M27 VH
QVQLVQSGAEVKKPGESLKISCQGSGYSFTDYWIGWVRQAPGQGLEWMGWITPNNGNTNYAPKFQGRVTLTTDTSTSTAYMELRSLTSDDTAVYFCARRGRNSSGYLYYYSMDVWGQGTTVTVSS

SEQ ID NO: 112 - protein, 122 aa, synthetic construct
  REGION 1..122: note = M28 VH
QLQLQESGAEVKKPGSSVKVSCKASGGTFSSYAISWVRQAPGQGLEWMGGIIPIFGTANYAQKFQGRVTITADESTSTAYMELSSLRSEDTAVYYCARDLGGYSYGHGLDYWGQGTLVTVSS

SEQ ID NO: 113 - protein, 117 aa, synthetic construct
  REGION 1..117: note = M31 VH
EVHLVESGGGLAQPGGSLRLSCAASGFSFSSSWMAWVRQAPGKGLEWVANIKQDGSSQYYVDSVKGRFTISRDNAKNSLSLQMNSLRAEDTAVYYCARDIWYSIDYWGQGTLVTVSS

SEQ ID NO: 114 - protein, 120 aa, synthetic construct
  REGION 1..120: note = M32 VH
QVQLVQSGAEVKKPGASVKVSCKASGFTFIGYYLHWVRQAPGQGLEWMGIINPSGGRTSMAQKFQGRVSMTTDTSTGTVYLDLGRLGSDDTAVYYCARADNWNAGSMDVWGNGTTVTVSS

SEQ ID NO: 115 - protein, 117 aa, synthetic construct
  REGION 1..117: note = M37 VH
QLQLQESGPGLVKPSETLSLTCAVSGGSISPYYWTWIRQSPGKAMEWMGYIHYSGRTNYNPSLESRATFSVDTSKNQISLKLNSVTAADTAVYYCTKVGDPGLFDYWGPGTLVTVSS

SEQ ID NO: 116 - protein, 242 aa, synthetic construct
  REGION 1..242: note = M6 scFv
EIVMTQSPATLSLSPGERATLSCRASQSIGNSLAWYQQKPGQAPRLLIYDVSNRATGIPARFSGSGSGTDFTLTISSLEPEDFAVYYCQHRYSWPLTFGGGTKVEIKGGGGSGGGGSGGGGSQVQLVQSGGGLVKPGGSLRLSCAASGFTFSDYYMSWIRQAPGKGLEWVSYISSSGSTIYYADSVKGRFTISRDNAKNSLYLQMNSLRAEDTAVYYCARDGYRTHNWFDPWGQGTLVTVSS

SEQ ID NO: 117 - protein, 244 aa, synthetic construct
  REGION 1..244: note = M7 scFv
DIRLTQSPSSLSASLGDRVTITCRASQAISSALAWYQQKPGKAPRLLIYDASTLESGVPSRFSGSGSGTDFTLTISSLQPEDFATYYCQQADSFPLTFGGGTKLEIKGGGGSGGGGSGGGGSQVQLVQSGAEVKKSGESLKISCKGSGYGFGAYWIAWVRQMPGKGLEWMGIIYPGDSRVIYSPYFQGQVTISADKSISTAYLQWSSLKASDTAMYYCARFGGPKFATNWFDIWGQGTTVTVSS

SEQ ID NO: 118 - protein, 243 aa, synthetic construct
  REGION 1..243: note = M8 scFv
DIQLTQSPSSLSASVGDRVTITCRASQSISSSLNWYQQKPGKAPKLLIYAASSLQSGVPSRFSGSGSGTDFTLTISSLQPEDFATYSCQQSYSTPLTFGGGTKVEIKGGGGSGGGGSGGGGSQVHLVESGGGVVQPGRSLRVSCAASGFTFSGYAMYWVRQAPGKGLEYVSAITTNGGSTNYADSVKGRFTISRDNSKNTLYLQMSSLRAGDTAVYYCARGAPGYRGYYMDVWGKGTTVTVSS

SEQ ID NO: 119 - protein, 240 aa, synthetic construct
  REGION 1..240: note = M10 scFv
DIRMTQSPSTLSASVGDRVTITCRASQSISSWLAWYQQKPGKAPKLLIYKASSLESGVPSRFSGSGSGTEFTLTISTLQPDDFATYYCQQYYSYPLTFGGGTKVEIKGGGGSGGGGSGGGGSQVQLVQSGGGLVQPGGSLRLSCAASGFTFSSYAMSWVRQAPGKGLEWVSAISGSGGSTYYADSVKGRFTISRDNSKNTLYLQMNSLRAEDTAVYYCAKRGSSWYFDYWGQGTLVTVSS

SEQ ID NO: 120 - protein, 241 aa, synthetic construct
  REGION 1..241: note = M12 scFv
AIRLTQSPSLLSASVGDRVTVTCRASQGGGNYLAWYQQKPGKAPKLLIYGASKLQSGVPSRFSGSGSGTEFTLTISSLQPEDFATYYCQQLNSYPVTFGQGTKVDIKGGGGSGGGGSGGGGSEVQLVESGAEVKKPGASVKVSCKASGYTFTTYYIHWVRQAPGQGLEWMGIINPSSGSTTYTQKFQGRVTMTRDTSTSTVYIELSGLRSEDTAVYYCARGETLRGYFDYWGQGTLVTVSS

SEQ ID NO: 121 - protein, 245 aa, synthetic construct
  REGION 1..245: note = M13 scFv
AIRMTQSPSSLSASVGDRVTITCRASQGISNSLAWYQQKPGKAPKLLLYAASRLESGVPSRFSGSGSGTDYTLTISSLQPEDFATYYCQQYYSTPFTFGPGTKLEIKGGGGSGGGGSGGGGSQVQLVQSGAEVKKPGSSVKVSCKTSADTFSANTINWVRQAPGHGLEWMGRIIPSLNIRDYAQEFQGRVTFTADESTNTVYMQLTSLRSEDTAVYYCARDPGSTWSPNQFFPHWGQGTLVTVSS

SEQ ID NO: 122 - protein, 242 aa, synthetic construct
  REGION 1..242: note = M15 scFv
DIQLTQSPSSLSASIGDRVTITCRASQGVNSALAWYQQKPGKPPNLLIYDASSLESGVPSRFSGSGSGRDFTLTISSLQPEDFATYYCQQFSSYPLTFGGGTKVDIKGGGGSGGGGSGGGGSQVQLVQSGAEVKKPGASVKVSCKASGYTFTSYYMHWVRQAPGQGLEWMGIINPSGGSTSYAQKFQGRVTMTRDTSTSTVYMELSSLRSEDTAVYYCARAQRGGSVYFDYWGQGTLVTVSS

SEQ ID NO: 123 - protein, 242 aa, synthetic construct
  REGION 1..242: note = M20 scFv
AIQMTQSPSSLSASVGNRVTITCRASQGISSAVAWYQQKPGKPPKLLISYASSLESGVPSRFSGSGSGTDFSLTISSLQPEDFATYFCQQFNSYPLTFGGGTKVEIKGGGGSGGGGSGGGGSQVQLVQSGAEVRKPGESLKISCKGSGYSFRDSWIAWVRQMPGQGLEWMGIIFPGDSNPIYSPSFQGQVTISADTSISTTFLQWRSLKASDSAIYYCARHAAWGAGWFDPWGQGTLVTVSS

SEQ ID NO: 124 - protein, 244 aa, synthetic construct
  REGION 1..244: note = M22 scFv
QSALTQPASVSGSPGQSITLSCTGTRRDIGGYEYVSWYQQHPGKAPKLLIFSVNNRPSGVSHRFSGSKSGNTASLTISGLQAEDEAAYFCSSYSSRDTLVLFGGGTKLTVLGGGGSGGGGSGGGGSQVQLVQSGAEVKKPGSSVKVSCKASGGTFSSYAISWVRQAPGQGLEWMGGIIPIFGTANYAQKFQGRVTITADESTSTAYMELSSLRSEDTAVYYCASGRSGSYGLYWGQGTLVTVSS

SEQ ID NO: 125 - protein, 242 aa, synthetic construct
  REGION 1..242: note = M24 scFv
QPVLTQPPSASGTPGQRVTISCSGSSSNIGSNYVYWYQQFPGTAPKLLIYMNNQRPSGVPDRFSGSKSGTSASLAISGLRSEDEADYYCAARDDSLSGYVTFGGGTKLTVLGGGGSGGGGSGGGGSEVHLVESGGGLVQPGGSLRLSCAASGFTFSSYAMSWVRQAPGKGLEWVSAISGSGGSTYYADSVKGRFTISRDNSKNTLYLQMNSLKTEDTAVYYCTRGVATFDYWGQGTLVTVSS

SEQ ID NO: 126 - protein, 248 aa, synthetic construct
  REGION 1..248: note = M27 scFv
EIVLTQSPGTLSLSPGERATLSCRASQPIVASHLAWYQHKPGQAPRLLIYGASTRAAGIPDRFSGSGSGTDFTLTISRLEPEDFAVYFCQQYGISPFTFGPGTKVDIKGGGGSGGGGSGGGGSQVQLVQSGAEVKKPGESLKISCQGSGYSFTDYWIGWVRQAPGQGLEWMGWITPNNGNTNYAPKFQGRVTLTTDTSTSTAYMELRSLTSDDTAVYFCARRGRNSSGYLYYYSMDVWGQGTTVTVSS

SEQ ID NO: 127 - protein, 248 aa, synthetic construct
  REGION 1..248: note = M28 scFv
QSALTQPPSASGSPGQSVTISCSGTSSDVGGYNFVSWYQHHPGKAPKLMIYEVSKRPSGVPDRFSGSKSGNTASLTVSGLQAEDEADYYCSSYAGRNNPYLFGTGTKLTVLGGGGSGGGGSGGGGSQLQLQESGAEVKKPGSSVKVSCKASGGTFSSYAISWVRQAPGQGLEWMGGIIPIFGTANYAQKFQGRVTITADESTSTAYMELSSLRSEDTAVYYCARDLGGYSYGHGLDYWGQGTLVTVSS

SEQ ID NO: 128 - protein, 242 aa, synthetic construct
  REGION 1..242: note = M31 scFv
QSALTQPPSASGSPGQSVTISCTGTSSDIGGYNSVSWYQQHPGKAPKLIIYGVSRRPSGVPDRFSGSKSANTASLTVSGLQAVDEADYYCSSYGGSNNLLFGGGTKLTVLGGGGSGGGGSGGGGSEVHLVESGGGLAQPGGSLRLSCAASGFSFSSSWMAWVRQAPGKGLEWVANIKQDGSSQYYVDSVKGRFTISRDNAKNSLSLQMNSLRAEDTAVYYCARDIWYSIDYWGQGTLVTVSS

SEQ ID NO: 129 - protein, 242 aa, synthetic construct
  REGION 1..242: note = M32 scFv
DIRMTQSPSSLSASVGDRVTVTCQASEDINNSLNWYQQKPGKAPQLLIYDASDLETGVPSRFSGRGSGRDFTLTISSLQPEDFATYYCQQLNSYPLTFGGGTKLEIKGGGGSGGGGSGGGGSQVQLVQSGAEVKKPGASVKVSCKASGFTFIGYYLHWVRQAPGQGLEWMGIINPSGGRTSMAQKFQGRVSMTTDTSTGTVYLDLGRLGSDDTAVYYCARADNWNAGSMDVWGNGTTVTVSS

SEQ ID NO: 130 - protein, 239 aa, synthetic construct
  REGION 1..239: note = M37 scFv
DIVMTQTPSSLSASVGDRVTITCRASQGISNYLAWFQQKPGKAPKPLIYAASSLQSGVPSKFSGSGSGTDFTLTISNLQPEDFATYICQQYSSYPITFGQGTRLEIKGGGGSGGGGSGGGGSQLQLQESGPGLVKPSETLSLTCAVSGGSISPYYWTWIRQSPGKAMEWMGYIHYSGRTNYNPSLESRATFSVDTSKNQISLKLNSVTAADTAVYYCTKVGDPGLFDYWGPGTLVTVSS

SEQ ID NO: 131 - protein, 486 aa, synthetic construct
  REGION 1..486: note = M6 CAR
MALPVTALLLPLALLLHAARPEIVMTQSPATLSLSPGERATLSCRASQSIGNSLAWYQQKPGQAPRLLIYDVSNRATGIPARFSGSGSGTDFTLTISSLEPEDFAVYYCQHRYSWPLTFGGGTKVEIKGGGGSGGGGSGGGGSQVQLVQSGGGLVKPGGSLRLSCAASGFTFSDYYMSWIRQAPGKGLEWVSYISSSGSTIYYADSVKGRFTISRDNAKNSLYLQMNSLRAEDTAVYYCARDGYRTHNWFDPWGQGTLVTVSSTTTPAPRPPTPAPTIASQPLSLRPEACRPAAGGAVHTRGLDFACDIYIWAPLAGTCGVLLLSLVITLYCKRGRKKLLYIFKQPFMRPVQTTQEEDGCSCRFPEEEEGGCELRVKFSRSADAPAYKQGQNQLYNELNLGRREEYDVLDKRRGRDPEMGGKPRRKNPQEGLYNELQKDKMAEAYSEIGMKGERRRGKGHDGLYQGLSTATKDTYDALHMQALPPR

SEQ ID NO: 132 - protein, 488 aa, synthetic construct
  REGION 1..488: note = M7 CAR
MALPVTALLLPLALLLHAARPDIRLTQSPSSLSASLGDRVTITCRASQAISSALAWYQQKPGKAPRLLIYDASTLESGVPSRFSGSGSGTDFTLTISSLQPEDFATYYCQQADSFPLTFGGGTKLEIKGGGGSGGGGSGGGGSQVQLVQSGAEVKKSGESLKISCKGSGYGFGAYWIAWVRQMPGKGLEWMGIIYPGDSRVIYSPYFQGQVTISADKSISTAYLQWSSLKASDTAMYYCARFGGPKFATNWFDIWGQGTTVTVSSTTTPAPRPPTPAPTIASQPLSLRPEACRPAAGGAVHTRGLDFACDIYIWAPLAGTCGVLLLSLVITLYCKRGRKKLLYIFKQPFMRPVQTTQEEDGCSCRFPEEEEGGCELRVKFSRSADAPAYKQGQNQLYNELNLGRREEYDVLDKRRGRDPEMGGKPRRKNPQEGLYNELQKDKMAEAYSEIGMKGERRRGKGHDGLYQGLSTATKDTYDALHMQALPPR

SEQ ID NO: 133 - protein, 487 aa, synthetic construct
  REGION 1..487: note = M8 CAR
MALPVTALLLPLALLLHAARPDIQLTQSPSSLSASVGDRVTITCRASQSISSSLNWYQQKPGKAPKLLIYAASSLQSGVPSRFSGSGSGTDFTLTISSLQPEDFATYSCQQSYSTPLTFGGGTKVEIKGGGGSGGGGSGGGGSQVHLVESGGGVVQPGRSLRVSCAASGFTFSGYAMYWVRQAPGKGLEYVSAITTNGGSTNYADSVKGRFTISRDNSKNTLYLQMSSLRAGDTAVYYCARGAPGYRGYYMDVWGKGTTVTVSSTTTPAPRPPTPAPTIASQPLSLRPEACRPAAGGAVHTRGLDFACDIYIWAPLAGTCGVLLLSLVITLYCKRGRKKLLYIFKQPFMRPVQTTQEEDGCSCRFPEEEEGGCELRVKFSRSADAPAYKQGQNQLYNELNLGRREEYDVLDKRRGRDPEMGGKPRRKNPQEGLYNELQKDKMAEAYSEIGMKGERRRGKGHDGLYQGLSTATKDTYDALHMQALPPR

SEQ ID NO: 134 - protein, 484 aa, synthetic construct
  REGION 1..484: note = M10 CAR
MALPVTALLLPLALLLHAARPDIRMTQSPSTLSASVGDRVTITCRASQSISSWLAWYQQKPGKAPKLLIYKASSLESGVPSRFSGSGSGTEFTLTISTLQPDDFATYYCQQYYSYPLTFGGGTKVEIKGGGGSGGGGSGGGGSQVQLVQSGGGLVQPGGSLRLSCAASGFTFSSYAMSWVRQAPGKGLEWVSAISGSGGSTYYADSVKGRFTISRDNSKNTLYLQMNSLRAEDTAVYYCAKRGSSWYFDYWGQGTLVTVSSTTTPAPRPPTPAPTIASQPLSLRPEACRPAAGGAVHTRGLDFACDIYIWAPLAGTCGVLLLSLVITLYCKRGRKKLLYIFKQPFMRPVQTTQEEDGCSCRFPEEEEGGCELRVKFSRSADAPAYKQGQNQLYNELNLGRREEYDVLDKRRGRDPEMGGKPRRKNPQEGLYNELQKDKMAEAYSEIGMKGERRRGKGHDGLYQGLSTATKDTYDALHMQALPPR

SEQ ID NO: 135 - protein, 485 aa, synthetic construct
  REGION 1..485: note = M12 CAR
MALPVTALLLPLALLLHAARPAIRLTQSPSLLSASVGDRVTVTCRASQGGGNYLAWYQQKPGKAPKLLIYGASKLQSGVPSRFSGSGSGTEFTLTISSLQPEDFATYYCQQLNSYPVTFGQGTKVDIKGGGGSGGGGSGGGGSEVQLVESGAEVKKPGASVKVSCKASGYTFTTYYIHWVRQAPGQGLEWMGIINPSSGSTTYTQKFQGRVTMTRDTSTSTVYIELSGLRSEDTAVYYCARGETLRGYFDYWGQGTLVTVSSTTTPAPRPPTPAPTIASQPLSLRPEACRPAAGGAVHTRGLDFACDIYIWAPLAGTCGVLLLSLVITLYCKRGRKKLLYIFKQPFMRPVQTTQEEDGCSCRFPEEEEGGCELRVKFSRSADAPAYKQGQNQLYNELNLGRREEYDVLDKRRGRDPEMGGKPRRKNPQEGLYNELQKDKMAEAYSEIGMKGERRRGKGHDGLYQGLSTATKDTYDALHMQALPPR

SEQ ID NO: 136 - protein, 489 aa, synthetic construct
  REGION 1..489: note = M13 CAR
MALPVTALLLPLALLLHAARPAIRMTQSPSSLSASVGDRVTITCRASQGISNSLAWYQQKPGKAPKLLLYAASRLESGVPSRFSGSGSGTDYTLTISSLQPEDFATYYCQQYYSTPFTFGPGTKLEIKGGGGSGGGGSGGGGSQVQLVQSGAEVKKPGSSVKVSCKTSADTFSANTINWVRQAPGHGLEWMGRIIPSLNIRDYAQEFQGRVTFTADESTNTVYMQLTSLRSEDTAVYYCARDPGSTWSPNQFFPHWGQGTLVTVSSTTTPAPRPPTPAPTIASQPLSLRPEACRPAAGGAVHTRGLDFACDIYIWAPLAGTCGVLLLSLVITLYCKRGRKKLLYIFKQPFMRPVQTTQEEDGCSCRFPEEEEGGCELRVKFSRSADAPAYKQGQNQLYNELNLGRREEYDVLDKRRGRDPEMGGKPRRKNPQEGLYNELQKDKMAEAYSEIGMKGERRRGKGHDGLYQGLSTATKDTYDALHMQALPPR

SEQ ID NO: 137 - protein, 486 aa, synthetic construct
  REGION 1..486: note = M15 CAR
MALPVTALLLPLALLLHAARPDIQLTQSPSSLSASIGDRVTITCRASQGVNSALAWYQQKPGKPPNLLIYDASSLESGVPSRFSGSGSGRDFTLTISSLQPEDFATYYCQQFSSYPLTFGGGTKVDIKGGGGSGGGGSGGGGSQVQLVQSGAEVKKPGASVKVSCKASGYTFTSYYMHWVRQAPGQGLEWMGIINPSGGSTSYAQKFQGRVTMTRDTSTSTVYMELSSLRSEDTAVYYCARAQRGGSVYFDYWGQGTLVTVSSTTTPAPRPPTPAPTIASQPLSLRPEACRPAAGGAVHTRGLDFACDIYIWAPLAGTCGVLLLSLVITLYCKRGRKKLLYIFKQPFMRPVQTTQEEDGCSCRFPEEEEGGCELRVKFSRSADAPAYKQGQNQLYNELNLGRREEYDVLDKRRGRDPEMGGKPRRKNPQEGLYNELQKDKMAEAYSEIGMKGERRRGKGHDGLYQGLSTATKDTYDALHMQALPPR

SEQ ID NO: 138 - protein, 486 aa, synthetic construct
  REGION 1..486: note = M20 CAR
MALPVTALLLPLALLLHAARPAIQMTQSPSSLSASVGNRVTITCRASQGISSAVAWYQQKPGKPPKLLISYASSLESGVPSRFSGSGSGTDFSLTISSLQPEDFATYFCQQFNSYPLTFGGGTKVEIKGGGGSGGGGSGGGGSQVQLVQSGAEVRKPGESLKISCKGSGYSFRDSWIAWVRQMPGQGLEWMGIIFPGDSNPIYSPSFQGQVTISADTSISTTFLQWRSLKASDSAIYYCARHAAWGAGWFDPWGQGTLVTVSSTTTPAPRPPTPAPTIASQPLSLRPEACRPAAGGAVHTRGLDFACDIYIWAPLAGTCGVLLLSLVITLYCKRGRKKLLYIFKQPFMRPVQTTQEEDGCSCRFPEEEEGGCELRVKFSRSADAPAYKQGQNQLYNELNLGRREEYDVLDKRRGRDPEMGGKPRRKNPQEGLYNELQKDKMAEAYSEIGMKGERRRGKGHDGLYQGLSTATKDTYDALHMQALPPR

SEQ ID NO: 139 - protein, 488 aa, synthetic construct
  REGION 1..488: note = M22 CAR
MALPVTALLLPLALLLHAARPQSALTQPASVSGSPGQSITLSCTGTRRDIGGYEYVSWYQQHPGKAPKLLIFSVNNRPSGVSHRFSGSKSGNTASLTISGLQAEDEAAYFCSSYSSRDTLVLFGGGTKLTVLGGGGSGGGGSGGGGSQVQLVQSGAEVKKPGSSVKVSCKASGGTFSSYAISWVRQAPGQGLEWMGGIIPIFGTANYAQKFQGRVTITADESTSTAYMELSSLRSEDTAVYYCASGRSGSYGLYWGQGTLVTVSSTTTPAPRPPTPAPTIASQPLSLRPEACRPAAGGAVHTRGLDFACDIYIWAPLAGTCGVLLLSLVITLYCKRGRKKLLYIFKQPFMRPVQTTQEEDGCSCRFPEEEEGGCELRVKFSRSADAPAYKQGQNQLYNELNLGRREEYDVLDKRRGRDPEMGGKPRRKNPQEGLYNELQKDKMAEAYSEIGMKGERRRGKGHDGLYQGLSTATKDTYDALHMQALPPR

SEQ ID NO: 140 - protein, 486 aa, synthetic construct
  REGION 1..486: note = M24 CAR
MALPVTALLLPLALLLHAARPQPVLTQPPSASGTPGQRVTISCSGSSSNIGSNYVYWYQQFPGTAPKLLIYMNNQRPSGVPDRFSGSKSGTSASLAISGLRSEDEADYYCAARDDSLSGYVTFGGGTKLTVLGGGGSGGGGSGGGGSEVHLVESGGGLVQPGGSLRLSCAASGFTFSSYAMSWVRQAPGKGLEWVSAISGSGGSTYYADSVKGRFTISRDNSKNTLYLQMNSLKTEDTAVYYCTRGVATFDYWGQGTLVTVSSTTTPAPRPPTPAPTIASQPLSLRPEACRPAAGGAVHTRGLDFACDIYIWAPLAGTCGVLLLSLVITLYCKRGRKKLLYIFKQPFMRPVQTTQEEDGCSCRFPEEEEGGCELRVKFSRSADAPAYKQGQNQLYNELNLGRREEYDVLDKRRGRDPEMGGKPRRKNPQEGLYNELQKDKMAEAYSEIGMKGERRRGKGHDGLYQGLSTATKDTYDALHMQALPPR

SEQ ID NO: 141 - protein, 492 aa, synthetic construct
  REGION 1..492: note = M27 CAR
MALPVTALLLPLALLLHAARPEIVLTQSPGTLSLSPGERATLSCRASQPIVASHLAWYQHKPGQAPRLLIYGASTRAAGIPDRFSGSGSGTDFTLTISRLEPEDFAVYFCQQYGISPFTFGPGTKVDIKGGGGSGGGGSGGGGSQVQLVQSGAEVKKPGESLKISCQGSGYSFTDYWIGWVRQAPGQGLEWMGWITPNNGNTNYAPKFQGRVTLTTDTSTSTAYMELRSLTSDDTAVYFCARRGRNSSGYLYYYSMDVWGQGTTVTVSSTTTPAPRPPTPAPTIASQPLSLRPEACRPAAGGAVHTRGLDFACDIYIWAPLAGTCGVLLLSLVITLYCKRGRKKLLYIFKQPFMRPVQTTQEEDGCSCRFPEEEEGGCELRVKFSRSADAPAYKQGQNQLYNELNLGRREEYDVLDKRRGRDPEMGGKPRRKNPQEGLYNELQKDKMAEAYSEIGMKGERRRGKGHDGLYQGLSTATKDTYDALHMQALPPR

SEQ ID NO: 142 - protein, 492 aa, synthetic construct
  REGION 1..492: note = M28 CAR
MALPVTALLLPLALLLHAARPQSALTQPPSASGSPGQSVTISCSGTSSDVGGYNFVSWYQHHPGKAPKLMIYEVSKRPSGVPDRFSGSKSGNTASLTVSGLQAEDEADYYCSSYAGRNNPYLFGTGTKLTVLGGGGSGGGGSGGGGSQLQLQESGAEVKKPGSSVKVSCKASGGTFSSYAISWVRQAPGQGLEWMGGIIPIFGTANYAQKFQGRVTITADESTSTAYMELSSLRSEDTAVYYCARDLGGYSYGHGLDYWGQGTLVTVSSTTTPAPRPPTPAPTIASQPLSLRPEACRPAAGGAVHTRGLDFACDIYIWAPLAGTCGVLLLSLVITLYCKRGRKKLLYIFKQPFMRPVQTTQEEDGCSCRFPEEEEGGCELRVKFSRSADAPAYKQGQNQLYNELNLGRREEYDVLDKRRGRDPEMGGKPRRKNPQEGLYNELQKDKMAEAYSEIGMKGERRRGKGHDGLYQGLSTATKDTYDALHMQALPPR

SEQ ID NO: 143 - protein, 486 aa, synthetic construct
  REGION 1..486: note = M31 CAR
MALPVTALLLPLALLLHAARPQSALTQPPSASGSPGQSVTISCTGTSSDIGGYNSVSWYQQHPGKAPKLIIYGVSRRPSGVPDRFSGSKSANTASLTVSGLQAVDEADYYCSSYGGSNNLLFGGGTKLTVLGGGGSGGGGSGGGGSEVHLVESGGGLAQPGGSLRLSCAASGFSFSSSWMAWVRQAPGKGLEWVANIKQDGSSQYYVDSVKGRFTISRDNAKNSLSLQMNSLRAEDTAVYYCARDIWYSIDYWGQGTLVTVSSTTTPAPRPPTPAPTIASQPLSLRPEACRPAAGGAVHTRGLDFACDIYIWAPLAGTCGVLLLSLVITLYCKRGRKKLLYIFKQPFMRPVQTTQEEDGCSCRFPEEEEGGCELRVKFSRSADAPAYKQGQNQLYNELNLGRREEYDVLDKRRGRDPEMGGKPRRKNPQEGLYNELQKDKMAEAYSEIGMKGERRRGKGHDGLYQGLSTATKDTYDALHMQALPPR

SEQ ID NO: 144 - protein, 486 aa, synthetic construct
  REGION 1..486: note = M32 CAR
MALPVTALLLPLALLLHAARPDIRMTQSPSSLSASVGDRVTVTCQASEDINNSLNWYQQKPGKAPQLLIYDASDLETGVPSRFSGRGSGRDFTLTISSLQPEDFATYYCQQLNSYPLTFGGGTKLEIKGGGGSGGGGSGGGGSQVQLVQSGAEVKKPGASVKVSCKASGFTFIGYYLHWVRQAPGQGLEWMGIINPSGGRTSMAQKFQGRVSMTTDTSTGTVYLDLGRLGSDDTAVYYCARADNWNAGSMDVWGNGTTVTVSSTTTPAPRPPTPAPTIASQPLSLRPEACRPAAGGAVHTRGLDFACDIYIWAPLAGTCGVLLLSLVITLYCKRGRKKLLYIFKQPFMRPVQTTQEEDGCSCRFPEEEEGGCELRVKFSRSADAPAYKQGQNQLYNELNLGRREEYDVLDKRRGRDPEMGGKPRRKNPQEGLYNELQKDKMAEAYSEIGMKGERRRGKGHDGLYQGLSTATKDTYDALHMQALPPR

SEQ ID NO: 145 - protein, 483 aa, synthetic construct
  REGION 1..483: note = M37 CAR
MALPVTALLLPLALLLHAARPDIVMTQTPSSLSASVGDRVTITCRASQGISNYLAWFQQKPGKAPKPLIYAASSLQSGVPSKFSGSGSGTDFTLTISNLQPEDFATYICQQYSSYPITFGQGTRLEIKGGGGSGGGGSGGGGSQLQLQESGPGLVKPSETLSLTCAVSGGSISPYYWTWIRQSPGKAMEWMGYIHYSGRTNYNPSLESRATFSVDTSKNQISLKLNSVTAADTAVYYCTKVGDPGLFDYWGPGTLVTVSSTTTPAPRPPTPAPTIASQPLSLRPEACRPAAGGAVHTRGLDFACDIYIWAPLAGTCGVLLLSLVITLYCKRGRKKLLYIFKQPFMRPVQTTQEEDGCSCRFPEEEEGGCELRVKFSRSADAPAYKQGQNQLYNELNLGRREEYDVLDKRRGRDPEMGGKPRRKNPQEGLYNELQKDKMAEAYSEIGMKGERRRGKGHDGLYQGLSTATKDTYDALHMQALPPR

SEQ ID NO: 146 - protein, 12 aa, synthetic construct
  REGION 1..12: note = BCMA21 VL CDR1
RASQSVSSNFLA

SEQ ID NO: 147 - protein, 14 aa, synthetic construct
  REGION 1..14: note = BCMA22\32\33 VL CDR1
TGTSSDVGGYNYVS

SEQ ID NO: 148 - protein, 13 aa, synthetic construct
  REGION 1..13: note = BCMA23 VL CDR1
SGSSPNIGGNSVN

SEQ ID NO: 149 - protein, 13 aa, synthetic construct
  REGION 1..13: note = BCMA24 VL CDR1
SGSSSNIGSYSVN

SEQ ID NO: 150 - protein, 14 aa, synthetic construct
  REGION 1..14: note = BCMA27 VL CDR1
TGSRSNVGSYNDVS

SEQ ID NO: 151 - protein, 13 aa, synthetic construct
  REGION 1..13: note = BCMA28 VL CDR1
SGSSSNIGQNAVN

SEQ ID NO: 152 - protein, 11 aa, synthetic construct
  REGION 1..11: note = BCMA30 VL CDR1
RASQGISSYLA

SEQ ID NO: 153 - protein, 14 aa, synthetic construct
  REGION 1..14: note = BCMA31 VL CDR1
TGTSSDVGTYNYVS

SEQ ID NO: 154 - protein, 13 aa, synthetic construct
  REGION 1..13: note = BCMA34 VL CDR1
TGNSNNVGNQGAA

SEQ ID NO: 155 - protein, 13 aa, synthetic construct
  REGION 1..13: note = BCMA35 VL CDR1
SGSSSNIGSNTVN

SEQ ID NO: 156 - protein, 7 aa, synthetic construct
  REGION 1..7: note = BCMA21 VL CDR2
GASNRAT

SEQ ID NO: 157 - protein, 7 aa, synthetic construct
  REGION 1..7: note = BCMA22 VL CDR2
EVTNRPS

SEQ ID NO: 158 - protein, 7 aa, synthetic construct
  REGION 1..7: note = BCMA23 VL CDR2
TNNQRPS

SEQ ID NO: 159 - protein, 7 aa, synthetic construct
  REGION 1..7: note = BCMA24\35 VL CDR2
SNNQRPS

SEQ ID NO: 160 - protein, 7 aa, synthetic construct
  REGION 1..7: note = BCMA27 VL CDR2
DVDKRPA

SEQ ID NO: 161 - protein, 7 aa, synthetic construct
  REGION 1..7: note = BCMA28 VL CDR2
YNDLVSS

SEQ ID NO: 162 - protein, 7 aa, synthetic construct
  REGION 1..7: note = BCMA30 VL CDR2
AASTLQS

SEQ ID NO: 163 - protein, 7 aa, synthetic construct
  REGION 1..7: note = BCMA31 VL CDR2
DVNQRPS

SEQ ID NO: 164 - protein, 7 aa, synthetic construct
  REGION 1..7: note = BCMA32 VL CDR2
DVSKRPS

SEQ ID NO: 165 - protein, 7 aa, synthetic construct
  REGION 1..7: note = BCMA33 VL CDR2
EVSKRPS

SEQ ID NO: 166 - protein, 7 aa, synthetic construct
  REGION 1..7: note = BCMA34 VL CDR2
RNNNRPS

SEQ ID NO: 167 - protein, 11 aa, synthetic construct
  REGION 1..11: note = BCMA21 VL CDR3
QHYDGSPPMYT

SEQ ID NO: 168 - protein, 12 aa, synthetic construct
  REGION 1..12: note = BCMA22 VL CDR3
ISYTSSSTLDYV

SEQ ID NO: 169 - protein, 11 aa, synthetic construct
  REGION 1..11: note = BCMA23\24 VL CDR3
AAWDDSLNGVV

SEQ ID NO: 170 - protein, 11 aa, synthetic construct
  REGION 1..11: note = BCMA27 VL CDR3
SSYGGTYSLFV

SEQ ID NO: 171 - protein, 11 aa, synthetic construct
  REGION 1..11: note = BCMA28 VL CDR3
ATWDDSLNGVV

SEQ ID NO: 172 - protein, 10 aa, synthetic construct
  REGION 1..10: note = BCMA30 VL CDR3
QQLNSYPPWT

SEQ ID NO: 173 - protein, 10 aa, synthetic construct
  REGION 1..10: note = BCMA31 VL CDR3
SSYGGSNNLV

SEQ ID NO: 174 - protein, 10 aa, synthetic construct
  REGION 1..10: note = BCMA32 VL CDR3
SSYTSSSTVV

SEQ ID NO: 175 - protein, 11 aa, synthetic construct
  REGION 1..11: note = BCMA33 VL CDR3
SSYAGSNNFVV

SEQ ID NO: 176 - protein, 11 aa, synthetic construct
  REGION 1..11: note = BCMA34 VL CDR3
SAWDSSLSARV

SEQ ID NO: 177 - protein, 11 aa, synthetic construct
  REGION 1..11: note = BCMA35 VL CDR3
AAWDDSLNGGV

SEQ ID NO: 178 - protein, 5 aa, synthetic construct
  REGION 1..5: note = BCMA21 VH CDR1
SYAMS

SEQ ID NO: 179 - protein, 6 aa, synthetic construct
  REGION 1..6: note = BCMA22 VH CDR1
SSNWWS

SEQ ID NO: 180 - protein, 5 aa, synthetic construct
  REGION 1..5: note = BCMA23\30 VH CDR1
SYWIG

SEQ ID NO: 181 - protein, 5 aa, synthetic construct
  REGION 1..5: note = BCMA24 VH CDR1
SYAIS

SEQ ID NO: 182 - protein, 5 aa, synthetic construct
  REGION 1..5: note = BCMA27 VH CDR1
SYGMH

SEQ ID NO: 183 - protein, 7 aa, synthetic construct
  REGION 1..7: note = BCMA28 VH CDR1
SNSAAWN

SEQ ID NO: 184 - protein, 5 aa, synthetic construct
  REGION 1..5: note = BCMA31 VH CDR1
SYWMS

SEQ ID NO: 185 - protein, 5 aa, synthetic construct
  REGION 1..5: note = BCMA32 VH CDR1
RYAIS

SEQ ID NO: 186 - protein, 5 aa, synthetic construct
  REGION 1..5: note = BCMA33 VH CDR1
DYAMH

SEQ ID NO: 187 - protein, 5 aa, synthetic construct
  REGION 1..5: note = BCMA34 VH CDR1
NPFVH

SEQ ID NO: 188 - protein, 5 aa, synthetic construct
  REGION 1..5: note = BCMA35 VH CDR1
SYDIS

SEQ ID NO: 189 - protein, 17 aa, synthetic construct
  REGION 1..17: note = BCMA21 VH CDR2
AISGSGGSTYYADSVKG

SEQ ID NO: 190 - protein, 16 aa, synthetic construct
  REGION 1..16: note = BCMA22 VH CDR2
EIYHSGSTNYNPSLKS

SEQ ID NO: 191 - protein, 17 aa, synthetic construct
  REGION 1..17: note = BCMA23 VH CDR2
IIYPGDSDTRYSPSFQG

SEQ ID NO: 192 - protein, 17 aa, synthetic construct
  REGION 1..17: note = BCMA24 VH CDR2
GIIPIFGTANYAQKFQG

SEQ ID NO: 193 - protein, 17 aa, synthetic construct
  REGION 1..17: note = BCMA27 VH CDR2
VISYDGSNKYYADSVKG

SEQ ID NO: 194 - protein, 18 aa, synthetic construct
  REGION 1..18: note = BCMA28 VH CDR2
RTYYRSKWYNDYAVSVKS

SEQ ID NO: 195 - protein, 17 aa, synthetic construct
  REGION 1..17: note = BCMA30 VH CDR2
IIYPGDSDTRYSPPFQG

SEQ ID NO: 196 - protein, 17 aa, synthetic construct
  REGION 1..17: note = BCMA31 VH CDR2
NIKPDGSDKYYVDSVKG

SEQ ID NO: 197 - protein, 17 aa, synthetic construct
  REGION 1..17: note = BCMA32 VH CDR2
GIIPFFGTSDYAQKFQG

SEQ ID NO: 198 - protein, 17 aa, synthetic construct
  REGION 1..17: note = BCMA33 VH CDR2
GISWNSGSIGYADSVKG

SEQ ID NO: 199 - protein, 17 aa, synthetic construct
  REGION 1..17: note = BCMA34 VH CDR2
IINLSGGDTLYAQKFQG

SEQ ID NO: 200 - protein, 17 aa, synthetic construct
  REGION 1..17: note = BCMA35 VH CDR2
WINAYNGNANYAQKLQG

SEQ ID NO: 201 - protein, 14 aa, synthetic construct
  REGION 1..14: note = BCMA21 VH CDR3
ITAMVTHNFYGMDV

SEQ ID NO: 202 - protein, 16 aa, synthetic construct
  REGION 1..16: note = BCMA22 VH CDR3
VGSGYSYGYGDRVLDY

SEQ ID NO: 203 - protein, 7 aa, synthetic construct
  REGION 1..7: note = BCMA23 VH CDR3
RGGALDY

SEQ ID NO: 204 - protein, 9 aa, synthetic construct
  REGION 1..9: note = BCMA24 VH CDR3
GSFYSSVNV

SEQ ID NO: 205 - protein, 13 aa, synthetic construct
  REGION 1..13: note = BCMA27 VH CDR3
EEFYGDSSYGMDV

SEQ ID NO: 206 - protein, 8 aa, synthetic construct
  REGION 1..8: note = BCMA28 VH CDR3
DYYYGMDV

SEQ ID NO: 207 - protein, 13 aa, synthetic construct
  REGION 1..13: note = BCMA30 VH CDR3
LDASGSQRGGMDV

SEQ ID NO: 208 - protein, 7 aa, synthetic construct
  REGION 1..7: note = BCMA31 VH CDR3
GATTYGS

SEQ ID NO: 209 - protein, 15 aa, synthetic construct
  REGION 1..15: note = BCMA32 VH CDR3
RVATTGTGFYYAMDV

SEQ ID NO: 210 - protein, 12 aa, synthetic construct
  REGION 1..12: note = BCMA33 VH CDR3
VGASAALGAFDI

SEQ ID NO: 211 - protein, 10 aa, synthetic construct
  REGION 1..10: note = BCMA34 VH CDR3
DQAGFGDSAY

SEQ ID NO: 212 - protein, 17 aa, synthetic construct
  REGION 1..17: note = BCMA35 VH CDR3
EYYYFWSNRAFYYGMDV

SEQ ID NO: 213 - protein, 110 aa, synthetic construct
  REGION 1..110: note = BCMA21 VL
EIVLTQSPGTLSLSPGERATLSCRASQSVSSNFLAWYQQKPGQSPRLLIFGASNRATGIPDRFSGGGSGTDFTLTISRLEPEDFAVYYCQHYDGSPPMYTFGQGTKLEIK

SEQ ID NO: 214 - protein, 112 aa, synthetic construct
  REGION 1..112: note = BCMA22 VL
QSALTQPASVSGSPGQSITISCTGTSSDVGGYNYVSWYQQHPGKAPKLMIYEVTNRPSGVSNRFSGSKSGNTASLTISGLQAEDEAHYYCISYTSSSTLDYVFGTGTKVTVL

SEQ ID NO: 215 - protein, 110 aa, synthetic construct
  REGION 1..110: note = BCMA23 VL
QSALTQPPSASGTPGQRVTISCSGSSPNIGGNSVNWYQQLPGTAPKLLMYTNNQRPSGVPDRFSGSKSGTSASLAISGLQSEDEADYYCAAWDDSLNGVVFGGGTKLTVL

SEQ ID NO: 216 - protein, 110 aa, synthetic construct
  REGION 1..110: note = BCMA24 VL
QSVLTQPPSASGTPGQRVTISCSGSSSNIGSYSVNWYQQIPGTAPKLLIYSNNQRPSGVPDRFSGSKSGTSASLAISGLQSEDEADYSCAAWDDSLNGVVFGGGTKLTVL

SEQ ID NO: 217 - protein, 111 aa, synthetic construct
  REGION 1..111: note = BCMA27 VL
QSALTQPPSASGSPGQSVTISCTGSRSNVGSYNDVSWYQQHPGKAPKLIIYDVDKRPAGVPDRFSGSKSGNTASLTVSGLQAEDDADYYCSSYGGTYSLFVFGTGTELTVL

SEQ ID NO: 218 - protein, 110 aa, synthetic construct
  REGION 1..110: note = BCMA28 VL
QSALTQPPSVSEAPRQRVTISCSGSSSNIGQNAVNWYQKLPGKAPKLLIYYNDLVSSGVSDRFSGSKSGTSASLAISGLQSEDEADYYCATWDDSLNGVVFGGGTKVTVL

SEQ ID NO: 219 - protein, 108 aa, synthetic construct
  REGION 1..108: note = BCMA30 VL
DIQMTQSPSFLSASVGDRVTITCRASQGISSYLAWYQQKPGKAPKLLIYAASTLQSGVPSRFSGSGSGTEFTLTISSLQPEDFATYYCQQLNSYPPWTFGQGTKVEIK

SEQ ID NO: 220 - protein, 110 aa, synthetic construct
  REGION 1..110: note = BCMA31 VL
QSALTQPPSASGSPGQSVTISCTGTSSDVGTYNYVSWYQQHPGKAPKLMIYDVNQRPSGVPDRFSGSKSGNTASLTVSGLQAEDEADYYCSSYGGSNNLVFGGGTKVTVL

SEQ ID NO: 221 - protein, 110 aa, synthetic construct
  REGION 1..110: note = BCMA32 VL
QSALTQPASVSGSPGQSITISCTGTSSDVGGYNYVSWYQQHPGKAPKLMIYDVSKRPSGVSNRFSGSKSGNTASLTISGLQAEDEADYYCSSYTSSSTVVFGGGTKLTVL

SEQ ID NO: 222 - protein, 111 aa, synthetic construct
  REGION 1..111: note = BCMA33 VL
QSALTQPPSASGSPGQSVTISCTGTSSDVGGYNYVSWYQQHPGKAPKLMIYEVSKRPSGVPDRFSGSKSGNTASLTVSGLQAEDEADYFCSSYAGSNNFVVFGGGTKLTVL

SEQ ID NO: 223 - protein, 110 aa, synthetic construct
  REGION 1..110: note = BCMA34 VL
QPGLTQPPSVSKGLRQTATLTCTGNSNNVGNQGAAWLQQHQGHPPKLLSYRNNNRPSGISERFSASRSGNTASLTITGLQPEDEADYYCSAWDSSLSARVFGGGTKLTVL

SEQ ID NO: 224 - protein, 110 aa, synthetic construct
  REGION 1..110: note = BCMA35 VL
QAVLTQPPSASGTPGQRVTISCSGSSSNIGSNTVNWYQQLPGTAPKLLIYSNNQRPSGVPDRFSGSKSGTSASLAISGLQSEDEADYYCAAWDDSLNGGVFGGGTELTVL

SEQ ID NO: 225 - protein, 123 aa, synthetic construct
  REGION 1..123: note = BCMA21 VH
EVQLVESGGGLVQPGGSLRLSCEASGFTFSSYAMSWVRQAPGKGLEWVSAISGSGGSTYYADSVKGRFTISRDNSKNTLYLQMNSLRAEDTAVYYCAKITAMVTHNFYGMDVWGQGTTVTVSS

SEQ ID NO: 226 - protein, 125 aa, synthetic construct
  REGION 1..125: note = BCMA22 VH
EVQLVESGPGLVKPSGTLSLTCAVSGGSISSSNWWSWVRQPPGKGLEWIGEIYHSGSTNYNPSLKSRVTISVDKSKNQFSLKLSSVTAADTAVYYCARVGSGYSYGYGDRVLDYWGQGTLVTVSS

SEQ ID NO: 227 - protein, 116 aa, synthetic construct
  REGION 1..116: note = BCMA23 VH
QVQLVQSGAEVKKPGESLKISCKGSGYSFTSYWIGWVRQMPGKGLEWMGIIYPGDSDTRYSPSFQGQVTISADKSISTAYLQWSSLKASDTAMYYCARRGGALDYWGQGTLVTVSS

SEQ ID NO: 228 - protein, 118 aa, synthetic construct
  REGION 1..118: note = BCMA24 VH
QVQLVQSGAEVKKPGSSVKVSCKASGGTFSSYAISWVRQAPGQGLEWMGGIIPIFGTANYAQKFQGRVTITADESTSTAYMELSSLRSEDTAVYYCARGSFYSSVNVWGQGTTVTVSS

SEQ ID NO: 229 - protein, 122 aa, synthetic construct
  REGION 1..122: note = BCMA27 VH
EVQLVESGGDLVQPGGSLRLSCAASGFTFSSYGMHWVRQAPGKGLEWVAVISYDGSNKYYADSVKGRFTISRDNSKNTLYLQMNSLRAEDTAVYYCAKEEFYGDSSYGMDVWGQGTTVTVSS

SEQ ID NO: 230 - protein, 120 aa, synthetic construct
  REGION 1..120: note = BCMA28 VH
QVQLVQSGPGLVKPSQTLSLTCAISGDSVSSNSAAWNWIRQSPSRGLEWLGRTYYRSKWYNDYAVSVKSRITINPDTSKNQFSLQLNSVTPEDTAVYYCARDYYYGMDVWGQGTTVTVSS

SEQ ID NO: 231 - protein, 122 aa, synthetic construct
  REGION 1..122: note = BCMA30 VH
QVQLVQSGAEVKKPGESLKISCKGSGYRFTSYWIGWVRQMPGKGLEWMGIIYPGDSDTRYSPPFQGQVTISADKSIDTAYLQWSSLKASDTAMYYCARLDASGSQRGGMDVWGQGTTVTVSS

SEQ ID NO: 232 - protein, 116 aa, synthetic construct
  REGION 1..116: note = BCMA31 VH
EVQLVESGGGLIQPGGSLRLSCAASGFTFSSYWMSWVRQSPGKGLEWVANIKPDGSDKYYVDSVKGRFTISRDNAKNSLDLQMNSLRGEDTAIYYCARGATTYGSWGQGTLVTVSS

SEQ ID NO: 233 - protein, 124 aa, synthetic construct
  REGION 1..124: note = BCMA32 VH
QVQLQESGAEVKKPGSSVKVSCKASGGTFSRYAISWVRQAPGQGLEWMGGIIPFFGTSDYAQKFQGRVTITADESTSTAYMDLSRLRSEDTAVYYCAVRVATTGTGFYYAMDVWGQGTTVTVSS

SEQ ID NO: 234 - protein, 121 aa, synthetic construct
  REGION 1..121: note = BCMA33 VH
EVQLVESGGGLVQPGRSLRLSCAASGFTFDDYAMHWVRQAPGKGLEWVSGISWNSGSIGYADSVKGRFTISRDNAKNSLYLQMNSLRAEDTALYYCAKVGASAALGAFDIWGQGTMVTVSS

SEQ ID NO: 235 - protein, 119 aa, synthetic construct
  REGION 1..119: note = BCMA34 VH
QVQLVQSGAEVKKPGASVKVSCKTSGYTFSNPFVHWVRQAPGQGLEWVGIINLSGGDTLYAQKFQGGVTMTRDTSTNTAYMELTSLTFEDTAVYYCARDQAGFGDSAYWGQGTLVTVSS

SEQ ID NO: 236 - protein, 126 aa, synthetic construct
  REGION 1..126: note = BCMA35 VH
QVQLVQSGAEVKKPGASVKVSCKASGYTFTSYDISWVRQAPGQGLEWMGWINAYNGNANYAQKLQGRVTMTTDTSMSTAYMELRSLRSDDSAVYYCAREYYYFWSNRAFYYGMDVWGQGTTVSVSS

SEQ ID NO: 237 - protein, 248 aa, synthetic construct
  REGION 1..248: note = BCMA21 scFv
EIVLTQSPGTLSLSPGERATLSCRASQSVSSNFLAWYQQKPGQSPRLLIFGASNRATGIPDRFSGGGSGTDFTLTISRLEPEDFAVYYCQHYDGSPPMYTFGQGTKLEIKGGGGSGGGGSGGGGSEVQLVESGGGLVQPGGSLRLSCEASGFTFSSYAMSWVRQAPGKGLEWVSAISGSGGSTYYADSVKGRFTISRDNSKNTLYLQMNSLRAEDTAVYYCAKITAMVTHNFYGMDVWGQGTTVTVSS

SEQ ID NO: 238 - protein, 252 aa, synthetic construct
  REGION 1..252: note = BCMA22 scFv
QSALTQPASVSGSPGQSITISCTGTSSDVGGYNYVSWYQQHPGKAPKLMIYEVTNRPSGVSNRFSGSKSGNTASLTISGLQAEDEAHYYCISYTSSSTLDYVFGTGTKVTVLGGGGSGGGGSGGGGSEVQLVESGPGLVKPSGTLSLTCAVSGGSISSSNWWSWVRQPPGKGLEWIGEIYHSGSTNYNPSLKSRVTISVDKSKNQFSLKLSSVTAADTAVYYCARVGSGYSYGYGDRVLDYWGQGTLVTVSS

SEQ ID NO: 239 - protein, 241 aa, synthetic construct
  REGION 1..241: note = BCMA23 scFv
QSALTQPPSASGTPGQRVTISCSGSSPNIGGNSVNWYQQLPGTAPKLLMYTNNQRPSGVPDRFSGSKSGTSASLAISGLQSEDEADYYCAAWDDSLNGVVFGGGTKLTVLGGGGSGGGGSGGGGSQVQLVQSGAEVKKPGESLKISCKGSGYSFTSYWIGWVRQMPGKGLEWMGIIYPGDSDTRYSPSFQGQVTISADKSISTAYLQWSSLKASDTAMYYCARRGGALDYWGQGTLVTVSS

SEQ ID NO: 240 - protein, 243 aa, synthetic construct
  REGION 1..243: note = BCMA24 scFv
QSVLTQPPSASGTPGQRVTISCSGSSSNIGSYSVNWYQQIPGTAPKLLIYSNNQRPSGVPDRFSGSKSGTSASLAISGLQSEDEADYSCAAWDDSLNGVVFGGGTKLTVLGGGGSGGGGSGGGGSQVQLVQSGAEVKKPGSSVKVSCKASGGTFSSYAISWVRQAPGQGLEWMGGIIPIFGTANYAQKFQGRVTITADESTSTAYMELSSLRSEDTAVYYCARGSFYSSVNVWGQGTTVTVSS

SEQ ID NO: 241 - protein, 248 aa, synthetic construct
  REGION 1..248: note = BCMA27 scFv
QSALTQPPSASGSPGQSVTISCTGSRSNVGSYNDVSWYQQHPGKAPKLIIYDVDKRPAGVPDRFSGSKSGNTASLTVSGLQAEDDADYYCSSYGGTYSLFVFGTGTELTVLGGGGSGGGGSGGGGSEVQLVESGGDLVQPGGSLRLSCAASGFTFSSYGMHWVRQAPGKGLEWVAVISYDGSNKYYADSVKGRFTISRDNSKNTLYLQMNSLRAEDTAVYYCAKEEFYGDSSYGMDVWGQGTTVTVSS

SEQ ID NO: 242 - protein, 245 aa, synthetic construct
  REGION 1..245: note = BCMA28 scFv
QSALTQPPSVSEAPRQRVTISCSGSSSNIGQNAVNWYQKLPGKAPKLLIYYNDLVSSGVSDRFSGSKSGTSASLAISGLQSEDEADYYCATWDDSLNGVVFGGGTKVTVLGGGGSGGGGSGGGGSQVQLVQSGPGLVKPSQTLSLTCAISGDSVSSNSAAWNWIRQSPSRGLEWLGRTYYRSKWYNDYAVSVKSRITINPDTSKNQFSLQLNSVTPEDTAVYYCARDYYYGMDVWGQGTTVTVSS

SEQ ID NO: 243 - protein, 245 aa, synthetic construct
  REGION 1..245: note = BCMA30 scFv
DIQMTQSPSFLSASVGDRVTITCRASQGISSYLAWYQQKPGKAPKLLIYAASTLQSGVPSRFSGSGSGTEFTLTISSLQPEDFATYYCQQLNSYPPWTFGQGTKVEIKGGGGSGGGGSGGGGSQVQLVQSGAEVKKPGESLKISCKGSGYRFTSYWIGWVRQMPGKGLEWMGIIYPGDSDTRYSPPFQGQVTISADKSIDTAYLQWSSLKASDTAMYYCARLDASGSQRGGMDVWGQGTTVTVSS

SEQ ID NO: 244 - protein, 241 aa, synthetic construct
  REGION 1..241: note = BCMA31 scFv
QSALTQPPSASGSPGQSVTISCTGTSSDVGTYNYVSWYQQHPGKAPKLMIYDVNQRPSGVPDRFSGSKSGNTASLTVSGLQAEDEADYYCSSYGGSNNLVFGGGTKVTVLGGGGSGGGGSGGGGSEVQLVESGGGLIQPGGSLRLSCAASGFTFSSYWMSWVRQSPGKGLEWVANIKPDGSDKYYVDSVKGRFTISRDNAKNSLDLQMNSLRGEDTAIYYCARGATTYGSWGQGTLVTVSS

SEQ ID NO: 245 - protein, 249 aa, synthetic construct
  REGION 1..249: note = BCMA32 scFv
QSALTQPASVSGSPGQSITISCTGTSSDVGGYNYVSWYQQHPGKAPKLMIYDVSKRPSGVSNRFSGSKSGNTASLTISGLQAEDEADYYCSSYTSSSTVVFGGGTKLTVLGGGGSGGGGSGGGGSQVQLQESGAEVKKPGSSVKVSCKASGGTFSRYAISWVRQAPGQGLEWMGGIIPFFGTSDYAQKFQGRVTITADESTSTAYMDLSRLRSEDTAVYYCAVRVATTGTGFYYAMDVWGQGTTVTVSS

SEQ ID NO: 246 - protein, 247 aa, synthetic construct
  REGION 1..247: note = BCMA33 scFv
QSALTQPPSASGSPGQSVTISCTGTSSDVGGYNYVSWYQQHPGKAPKLMIYEVSKRPSGVPDRFSGSKSGNTASLTVSGLQAEDEADYFCSSYAGSNNFVVFGGGTKLTVLGGGGSGGGGSGGGGSEVQLVESGGGLVQPGRSLRLSCAASGFTFDDYAMHWVRQAPGKGLEWVSGISWNSGSIGYADSVKGRFTISRDNAKNSLYLQMNSLRAEDTALYYCAKVGASAALGAFDIWGQGTMVTVSS

SEQ ID NO: 247 - protein, 244 aa, synthetic construct
  REGION 1..244: note = BCMA34 scFv
QPGLTQPPSVSKGLRQTATLTCTGNSNNVGNQGAAWLQQHQGHPPKLLSYRNNNRPSGISERFSASRSGNTASLTITGLQPEDEADYYCSAWDSSLSARVFGGGTKLTVLGGGGSGGGGSGGGGSQVQLVQSGAEVKKPGASVKVSCKTSGYTFSNPFVHWVRQAPGQGLEWVGIINLSGGDTLYAQKFQGGVTMTRDTSTNTAYMELTSLTFEDTAVYYCARDQAGFGDSAYWGQGTLVTVSS

SEQ ID NO: 248 - protein, 251 aa, synthetic construct
  REGION 1..251: note = BCMA35 scFv
QAVLTQPPSASGTPGQRVTISCSGSSSNIGSNTVNWYQQLPGTAPKLLIYSNNQRPSGVPDRFSGSKSGTSASLAISGLQSEDEADYYCAAWDDSLNGGVFGGGTELTVLGGGGSGGGGSGGGGSQVQLVQSGAEVKKPGASVKVSCKASGYTFTSYDISWVRQAPGQGLEWMGWINAYNGNANYAQKLQGRVTMTTDTSMSTAYMELRSLRSDDSAVYYCAREYYYFWSNRAFYYGMDVWGQGTTVSVSS

SEQ ID NO: 249 - protein, 493 aa, synthetic construct
  REGION 1..493: note = BCMA21 CAR
MLLLVTSLLLCELPHPAFLLIPEIVLTQSPGTLSLSPGERATLSCRASQSVSSNFLAWYQQKPGQSPRLLIFGASNRATGIPDRFSGGGSGTDFTLTISRLEPEDFAVYYCQHYDGSPPMYTFGQGTKLEIKGGGGSGGGGSGGGGSEVQLVESGGGLVQPGGSLRLSCEASGFTFSSYAMSWVRQAPGKGLEWVSAISGSGGSTYYADSVKGRFTISRDNSKNTLYLQMNSLRAEDTAVYYCAKITAMVTHNFYGMDVWGQGTTVTVSSTTTPAPRPPTPAPTIASQPLSLRPEACRPAAGGAVHTRGLDFACDIYIWAPLAGTCGVLLLSLVITLYCKRGRKKLLYIFKQPFMRPVQTTQEEDGCSCRFPEEEEGGCELRVKFSRSADAPAYQQGQNQLYNELNLGRREEYDVLDKRRGRDPEMGGKPRRKNPQEGLYNELQKDKMAEAYSEIGMKGERRRGKGHDGLYQGLSTATKDTYDALHMQALPPR

SEQ ID NO: 250 - protein, 497 aa, synthetic construct
  REGION 1..497: note = BCMA22 CAR
MLLLVTSLLLCELPHPAFLLIPQSALTQPASVSGSPGQSITISCTGTSSDVGGYNYVSWYQQHPGKAPKLMIYEVTNRPSGVSNRFSGSKSGNTASLTISGLQAEDEAHYYCISYTSSSTLDYVFGTGTKVTVLGGGGSGGGGSGGGGSEVQLVESGPGLVKPSGTLSLTCAVSGGSISSSNWWSWVRQPPGKGLEWIGEIYHSGSTNYNPSLKSRVTISVDKSKNQFSLKLSSVTAADTAVYYCARVGSGYSYGYGDRVLDYWGQGTLVTVSSTTTPAPRPPTPAPTIASQPLSLRPEACRPAAGGAVHTRGLDFACDIYIWAPLAGTCGVLLLSLVITLYCKRGRKKLLYIFKQPFMRPVQTTQEEDGCSCRFPEEEEGGCELRVKFSRSADAPAYQQGQNQLYNELNLGRREEYDVLDKRRGRDPEMGGKPRRKNPQEGLYNELQKDKMAEAYSEIGMKGERRRGKGHDGLYQGLSTATKDTYDALHMQALPPR

SEQ ID NO: 251 - protein, 486 aa, synthetic construct
  REGION 1..486: note = BCMA23 CAR
MLLLVTSLLLCELPHPAFLLIPQSALTQPPSASGTPGQRVTISCSGSSPNIGGNSVNWYQQLPGTAPKLLMYTNNQRPSGVPDRFSGSKSGTSASLAISGLQSEDEADYYCAAWDDSLNGVVFGGGTKLTVLGGGGSGGGGSGGGGSQVQLVQSGAEVKKPGESLKISCKGSGYSFTSYWIGWVRQMPGKGLEWMGIIYPGDSDTRYSPSFQGQVTISADKSISTAYLQWSSLKASDTAMYYCARRGGALDYWGQGTLVTVSSTTTPAPRPPTPAPTIASQPLSLRPEACRPAAGGAVHTRGLDFACDIYIWAPLAGTCGVLLLSLVITLYCKRGRKKLLYIFKQPFMRPVQTTQEEDGCSCRFPEEEEGGCELRVKFSRSADAPAYQQGQNQLYNELNLGRREEYDVLDKRRGRDPEMGGKPRRKNPQEGLYNELQKDKMAEAYSEIGMKGERRRGKGHDGLYQGLSTATKDTYDALHMQALPPR

SEQ ID NO: 252 - protein, 488 aa, synthetic construct
  REGION 1..488: note = BCMA24 CAR
MLLLVTSLLLCELPHPAFLLIPQSVLTQPPSASGTPGQRVTISCSGSSSNIGSYSVNWYQQIPGTAPKLLIYSNNQRPSGVPDRFSGSKSGTSASLAISGLQSEDEADYSCAAWDDSLNGVVFGGGTKLTVLGGGGSGGGGSGGGGSQVQLVQSGAEVKKPGSSVKVSCKASGGTFSSYAISWVRQAPGQGLEWMGGIIPIFGTANYAQKFQGRVTITADESTSTAYMELSSLRSEDTAVYYCARGSFYSSVNVWGQGTTVTVSSTTTPAPRPPTPAPTIASQPLSLRPEACRPAAGGAVHTRGLDFACDIYIWAPLAGTCGVLLLSLVITLYCKRGRKKLLYIFKQPFMRPVQTTQEEDGCSCRFPEEEEGGCELRVKFSRSADAPAYQQGQNQLYNELNLGRREEYDVLDKRRGRDPEMGGKPRRKNPQEGLYNELQKDKMAEAYSEIGMKGERRRGKGHDGLYQGLSTATKDTYDALHMQALPPR

SEQ ID NO: 253 - protein, 493 aa, synthetic construct
  REGION 1..493: note = BCMA27 CAR
MLLLVTSLLLCELPHPAFLLIPQSALTQPPSASGSPGQSVTISCTGSRSNVGSYNDVSWYQQHPGKAPKLIIYDVDKRPAGVPDRFSGSKSGNTASLTVSGLQAEDDADYYCSSYGGTYSLFVFGTGTELTVLGGGGSGGGGSGGGGSEVQLVESGGDLVQPGGSLRLSCAASGFTFSSYGMHWVRQAPGKGLEWVAVISYDGSNKYYADSVKGRFTISRDNSKNTLYLQMNSLRAEDTAVYYCAKEEFYGDSSYGMDVWGQGTTVTVSSTTTPAPRPPTPAPTIASQPLSLRPEACRPAAGGAVHTRGLDFACDIYIWAPLAGTCGVLLLSLVITLYCKRGRKKLLYIFKQPFMRPVQTTQEEDGCSCRFPEEEEGGCELRVKFSRSADAPAYQQGQNQLYNELNLGRREEYDVLDKRRGRDPEMGGKPRRKNPQEGLYNELQKDKMAEAYSEIGMKGERRRGKGHDGLYQGLSTATKDTYDALHMQALPPR

SEQ ID NO: 254 - protein, 490 aa, synthetic construct
  REGION 1..490: note = BCMA28 CAR
MLLLVTSLLLCELPHPAFLLIPQSALTQPPSVSEAPRQRVTISCSGSSSNIGQNAVNWYQKLPGKAPKLLIYYNDLVSSGVSDRFSGSKSGTSASLAISGLQSEDEADYYCATWDDSLNGVVFGGGTKVTVLGGGGSGGGGSGGGGSQVQLVQSGPGLVKPSQTLSLTCAISGDSVSSNSAAWNWIRQSPSRGLEWLGRTYYRSKWYNDYAVSVKSRITINPDTSKNQFSLQLNSVTPEDTAVYYCARDYYYGMDVWGQGTTVTVSSTTTPAPRPPTPAPTIASQPLSLRPEACRPAAGGAVHTRGLDFACDIYIWAPLAGTCGVLLLSLVITLYCKRGRKKLLYIFKQPFMRPVQTTQEEDGCSCRFPEEEEGGCELRVKFSRSADAPAYQQGQNQLYNELNLGRREEYDVLDKRRGRDPEMGGKPRRKNPQEGLYNELQKDKMAEAYSEIGMKGERRRGKGHDGLYQGLSTATKDTYDALHMQALPPR

SEQ ID NO: 255 - protein, 490 aa, synthetic construct
  REGION 1..490: note = BCMA30 CAR
MLLLVTSLLLCELPHPAFLLIPDIQMTQSPSFLSASVGDRVTITCRASQGISSYLAWYQQKPGKAPKLLIYAASTLQSGVPSRFSGSGSGTEFTLTISSLQPEDFATYYCQQLNSYPPWTFGQGTKVEIKGGGGSGGGGSGGGGSQVQLVQSGAEVKKPGESLKISCKGSGYRFTSYWIGWVRQMPGKGLEWMGIIYPGDSDTRYSPPFQGQVTISADKSIDTAYLQWSSLKASDTAMYYCARLDASGSQRGGMDVWGQGTTVTVSSTTTPAPRPPTPAPTIASQPLSLRPEACRPAAGGAVHTRGLDFACDIYIWAPLAGTCGVLLLSLVITLYCKRGRKKLLYIFKQPFMRPVQTTQEEDGCSCRFPEEEEGGCELRVKFSRSADAPAYQQGQNQLYNELNLGRREEYDVLDKRRGRDPEMGGKPRRKNPQEGLYNELQKDKMAEAYSEIGMKGERRRGKGHDGLYQGLSTATKDTYDALHMQALPPR

SEQ ID NO: 256 - protein, 486 aa, synthetic construct
  REGION 1..486: note = BCMA31 CAR
MLLLVTSLLLCELPHPAFLLIPQSALTQPPSASGSPGQSVTISCTGTSSDVGTYNYVSWYQQHPGKAPKLMIYDVNQRPSGVPDRFSGSKSGNTASLTVSGLQAEDEADYYCSSYGGSNNLVFGGGTKVTVLGGGGSGGGGSGGGGSEVQLVESGGGLIQPGGSLRLSCAASGFTFSSYWMSWVRQSPGKGLEWVANIKPDGSDKYYVDSVKGRFTISRDNAKNSLDLQMNSLRGEDTAIYYCARGATTYGSWGQGTLVTVSSTTTPAPRPPTPAPTIASQPLSLRPEACRPAAGGAVHTRGLDFACDIYIWAPLAGTCGVLLLSLVITLYCKRGRKKLLYIFKQPFMRPVQTTQEEDGCSCRFPEEEEGGCELRVKFSRSADAPAYQQGQNQLYNELNLGRREEYDVLDKRRGRDPEMGGKPRRKNPQEGLYNELQKDKMAEAYSEIGMKGERRRGKGHDGLYQGLSTATKDTYDALHMQALPPR

SEQ ID NO: 257 - protein, 494 aa, synthetic construct
  REGION 1..494: note = BCMA32 CAR
MLLLVTSLLLCELPHPAFLLIPQSALTQPASVSGSPGQSITISCTGTSSDVGGYNYVSWYQQHPGKAPKLMIYDVSKRPSGVSNRFSGSKSGNTASLTISGLQAEDEADYYCSSYTSSSTVVFGGGTKLTVLGGGGSGGGGSGGGGSQVQLQESGAEVKKPGSSVKVSCKASGGTFSRYAISWVRQAPGQGLEWMGGIIPFFGTSDYAQKFQGRVTITADESTSTAYMDLSRLRSEDTAVYYCAVRVATTGTGFYYAMDVWGQGTTVTVSSTTTPAPRPPTPAPTIASQPLSLRPEACRPAAGGAVHTRGLDFACDIYIWAPLAGTCGVLLLSLVITLYCKRGRKKLLYIFKQPFMRPVQTTQEEDGCSCRFPEEEEGGCELRVKFSRSADAPAYQQGQNQLYNELNLGRREEYDVLDKRRGRDPEMGGKPRRKNPQEGLYNELQKDKMAEAYSEIGMKGERRRGKGHDGLYQGLSTATKDTYDALHMQALPPR

SEQ ID NO: 258 - protein, 492 aa, synthetic construct
  REGION 1..492: note = BCMA33 CAR
MLLLVTSLLLCELPHPAFLLIPQSALTQPPSASGSPGQSVTISCTGTSSDVGGYNYVSWYQQHPGKAPKLMIYEVSKRPSGVPDRFSGSKSGNTASLTVSGLQAEDEADYFCSSYAGSNNFVVFGGGTKLTVLGGGGSGGGGSGGGGSEVQLVESGGGLVQPGRSLRLSCAASGFTFDDYAMHWVRQAPGKGLEWVSGISWNSGSIGYADSVKGRFTISRDNAKNSLYLQMNSLRAEDTALYYCAKVGASAALGAFDIWGQGTMVTVSSTTTPAPRPPTPAPTIASQPLSLRPEACRPAAGGAVHTRGLDFACDIYIWAPLAGTCGVLLLSLVITLYCKRGRKKLLYIFKQPFMRPVQTTQEEDGCSCRFPEEEEGGCELRVKFSRSADAPAYQQGQNQLYNELNLGRREEYDVLDKRRGRDPEMGGKPRRKNPQEGLYNELQKDKMAEAYSEIGMKGERRRGKGHDGLYQGLSTATKDTYDALHMQALPPR

SEQ ID NO: 259 - protein, 489 aa, synthetic construct
  REGION 1..489: note = BCMA34 CAR
MLLLVTSLLLCELPHPAFLLIPQPGLTQPPSVSKGLRQTATLTCTGNSNNVGNQGAAWLQQHQGHPPKLLSYRNNNRPSGISERFSASRSGNTASLTITGLQPEDEADYYCSAWDSSLSARVFGGGTKLTVLGGGGSGGGGSGGGGSQVQLVQSGAEVKKPGASVKVSCKTSGYTFSNPFVHWVRQAPGQGLEWVGIINLSGGDTLYAQKFQGGVTMTRDTSTNTAYMELTSLTFEDTAVYYCARDQAGFGDSAYWGQGTLVTVSSTTTPAPRPPTPAPTIASQPLSLRPEACRPAAGGAVHTRGLDFACDIYIWAPLAGTCGVLLLSLVITLYCKRGRKKLLYIFKQPFMRPVQTTQEEDGCSCRFPEEEEGGCELRVKFSRSADAPAYQQGQNQLYNELNLGRREEYDVLDKRRGRDPEMGGKPRRKNPQEGLYNELQKDKMAEAYSEIGMKGERRRGKGHDGLYQGLSTATKDTYDALHMQALPPR

SEQ ID NO: 260 - protein, 496 aa, synthetic construct
  REGION 1..496: note = BCMA35 CAR
MLLLVTSLLLCELPHPAFLLIPQAVLTQPPSASGTPGQRVTISCSGSSSNIGSNTVNWYQQLPGTAPKLLIYSNNQRPSGVPDRFSGSKSGTSASLAISGLQSEDEADYYCAAWDDSLNGGVFGGGTELTVLGGGGSGGGGSGGGGSQVQLVQSGAEVKKPGASVKVSCKASGYTFTSYDISWVRQAPGQGLEWMGWINAYNGNANYAQKLQGRVTMTTDTSMSTAYMELRSLRSDDSAVYYCAREYYYFWSNRAFYYGMDVWGQGTTVSVSSTTTPAPRPPTPAPTIASQPLSLRPEACRPAAGGAVHTRGLDFACDIYIWAPLAGTCGVLLLSLVITLYCKRGRKKLLYIFKQPFMRPVQTTQEEDGCSCRFPEEEEGGCELRVKFSRSADAPAYQQGQNQLYNELNLGRREEYDVLDKRRGRDPEMGGKPRRKNPQEGLYNELQKDKMAEAYSEIGMKGERRRGKGHDGLYQGLSTATKDTYDALHMQALPPR

SEQ ID NO: 261 - protein, 14 aa, synthetic construct
  REGION 1..14: note = C18\20\25\28 VL CDR1
TGTSSDVGGYNYVS

SEQ ID NO: 262 - protein, 13 aa, synthetic construct
  REGION 1..13: note = C11\29 VL CDR1
SGSSSNIGSNYVY

SEQ ID NO: 263 - protein, 14 aa, synthetic construct
  REGION 1..14: note = C1 VL CDR1
TGTSSDIGAYNYVS

SEQ ID NO: 264 - protein, 14 aa, synthetic construct
  REGION 1..14: note = C8 VL CDR1
TGTSTDIGGYDFVS

SEQ ID NO: 265 - protein, 14 aa, synthetic construct
  REGION 1..14: note = C17 VL CDR1
TGTSSDVGTYDYVS

SEQ ID NO: 266 - protein, 14 aa, synthetic construct
  REGION 1..14: note = C34 VL CDR1
TGTRSDVGAYNYVS

SEQ ID NO: 267 - protein, 11 aa, synthetic construct
  REGION 1..11: note = C3 VL CDR1
RASQGIGTYLA

SEQ ID NO: 268 - protein, 12 aa, synthetic construct
  REGION 1..12: note = C7 VL CDR1
RASQSVSSSYLA

SEQ ID NO: 269 - protein, 11 aa, synthetic construct
  REGION 1..11: note = C14 VL CDR1
QASQDITNYLN

SEQ ID NO: 270 - protein, 11 aa, synthetic construct
  REGION 1..11: note = C15 VL CDR1
RASQSISSWLA

SEQ ID NO: 271 - protein, 11 aa, synthetic construct
  REGION 1..11: note = C19 VL CDR1
RASQDIRHDLG

SEQ ID NO: 272 - protein, 11 aa, synthetic construct
  REGION 1..11: note = C23 VL CDR1
QASQDISNYLN

SEQ ID NO: 273 - protein, 11 aa, synthetic construct
  REGION 1..11: note = C24 VL CDR1
RASQSISSYLN

SEQ ID NO: 274 - protein, 12 aa, synthetic construct
  REGION 1..12: note = C27 VL CDR1
RASQRVSATYLA

SEQ ID NO: 275 - protein, 11 aa, synthetic construct
  REGION 1..11: note = C30 VL CDR1
QASQNINNYLN

SEQ ID NO: 276 - protein, 11 aa, synthetic construct
  REGION 1..11: note = C33 VL CDR1
RASQDISSWIA

SEQ ID NO: 277 - protein, 13 aa, synthetic construct
  REGION 1..13: note = C2\12 VL CDR1
SGSSSNIGNNYVS

SEQ ID NO: 278 - protein, 13 aa, synthetic construct
  REGION 1..13: note = C4 VL CDR1
SGSSSNIGSNYVN

SEQ ID NO: 279 - protein, 13 aa, synthetic construct
  REGION 1..13: note = C21 VL CDR1
SGSSSNVGGNPVY

SEQ ID NO: 280 - protein, 13 aa, synthetic construct
  REGION 1..13: note = C26 VL CDR1
SGSRSNIGSNTVS

SEQ ID NO: 281 - protein, 13 aa, synthetic construct
  REGION 1..13: note = C35 VL CDR1
SGSSPNIGNNYVS

SEQ ID NO: 282 - protein, 13 aa, synthetic construct
  REGION 1..13: note = C16\32 VL CDR1
SGSSSNIEGNTVS

SEQ ID NO: 283 - protein, 13 aa, synthetic construct
  REGION 1..13: note = C5 VL CDR1
TRSSGSIAGSYVQ

SEQ ID NO: 284 - protein, 11 aa, synthetic construct
  REGION 1..11: note = C6 VL CDR1
SGADLGDQYVS

SEQ ID NO: 285 - protein, 13 aa, synthetic construct
  REGION 1..13: note = C9 VL CDR1
SGSNSNIENNYVY

SEQ ID NO: 286 - protein, 11 aa, synthetic construct
  REGION 1..11: note = C10 VL CDR1
GGNNIGSKSVH

SEQ ID NO: 287 - protein, 16 aa, synthetic construct
  REGION 1..16: note = C13 VL CDR1
RSSQGLVFSDGVTYLN

SEQ ID NO: 288 - protein, 11 aa, synthetic construct
  REGION 1..11: note = C22 VL CDR1
GANNIETKSVH

SEQ ID NO: 289 - protein, 13 aa, synthetic construct
  REGION 1..13: note = C31 VL CDR1
SGGNSNIGDNSVS

SEQ ID NO: 290 - protein, 7 aa, synthetic construct
  REGION 1..7: note = C18\25\28 VL CDR2
DVSNRPS

SEQ ID NO: 291 - protein, 7 aa, synthetic construct
  REGION 1..7: note = C20 VL CDR2
EVSERPS

SEQ ID NO: 292 - protein, 7 aa, synthetic construct
  REGION 1..7: note = C4\11\29 VL CDR2
RNNQRPS

SEQ ID NO: 293 - protein, 7 aa, synthetic construct
  REGION 1..7: note = C1 VL CDR2
DVSHRPS

SEQ ID NO: 294 - protein, 7 aa, synthetic construct
  REGION 1..7: note = C8 VL CDR2
DVSSRPS

SEQ ID NO: 295 - protein, 7 aa, synthetic construct
  REGION 1..7: note = C17 VL CDR2
DVTYRPS

SEQ ID NO: 296 - protein, 7 aa, synthetic construct
  REGION 1..7: note = C34 VL CDR2
DVSKRPS

SEQ ID NO: 297 - protein, 7 aa, synthetic construct
  REGION 1..7: note = C3 VL CDR2
AASNLQS

SEQ ID NO: 298 - protein, 7 aa, synthetic construct
  REGION 1..7: note = C7 VL CDR2
GASSRAT

SEQ ID NO: 299 - protein, 7 aa, synthetic construct
  REGION 1..7: note = C14\23 VL CDR2
DASNLET

SEQ ID NO: 300 - protein, 7 aa, synthetic construct
  REGION 1..7: note = C15 VL CDR2
KTSALED

SEQ ID NO: 301 - protein, 7 aa, synthetic construct
  REGION 1..7: note = C19 VL CDR2
ATSTLQS

SEQ ID NO: 302 - protein, 7 aa, synthetic construct
  REGION 1..7: note = C24\33 VL CDR2
AASSLQS

SEQ ID NO: 303 - protein, 7 aa, synthetic construct
  REGION 1..7: note = C27 VL CDR2
GGSRRAT

SEQ ID NO: 304 - protein, 7 aa, synthetic construct
  REGION 1..7: note = C30 VL CDR2
DASNLEA

SEQ ID NO: 305 - protein, 7 aa, synthetic construct
  REGION 1..7: note = C2\35 VL CDR2
DNNKRPS

SEQ ID NO: 306 - protein, 7 aa, synthetic construct
  REGION 1..7: note = C12 VL CDR2
DDNKRPS

SEQ ID NO: 307 - protein, 7 aa, synthetic construct
  REGION 1..7: note = C21 VL CDR2
GHNQRPP

SEQ ID NO: 308 - protein, 7 aa, synthetic construct
  REGION 1..7: note = C26 VL CDR2
LNNQRPS

SEQ ID NO: 309 - protein, 7 aa, synthetic construct
  REGION 1..7: note = C16\32 VL CDR2
SNSYRAS

SEQ ID NO: 310 - protein, 7 aa, synthetic construct
  REGION 1..7: note = C5 VL CDR2
QDNQRPS

SEQ ID NO: 311 - protein, 7 aa, synthetic construct
  REGION 1..7: note = C6 VL CDR2
EDDKRPS

SEQ ID NO: 312 - protein, 7 aa, synthetic construct
  REGION 1..7: note = C9 VL CDR2
QNNQRPS

SEQ ID NO: 313 - protein, 7 aa, synthetic construct
  REGION 1..7: note = C10 VL CDR2
DDSDRPS

SEQ ID NO: 314 - protein, 7 aa, synthetic construct
  REGION 1..7: note = C13 VL CDR2
KVSNRDS

SEQ ID NO: 315 - protein, 7 aa, synthetic construct
  REGION 1..7: note = C22 VL CDR2
YDSDRPS

SEQ ID NO: 316 - protein, 7 aa, synthetic construct
  REGION 1..7: note = C31 VL CDR2
NNNQRPL

SEQ ID NO: 317 - protein, 10 aa, synthetic construct
  REGION 1..10: note = C25 VL CDR3
SSYTSSSTWV

SEQ ID NO: 318 - protein, 10 aa, synthetic construct
  REGION 1..10: note = C28 VL CDR3
SSYTSSSNWV

SEQ ID NO: 319 - protein, 10 aa, synthetic construct
  REGION 1..10: note = C20 VL CDR3
SSYAGSNILV

SEQ ID NO: 320 - protein, 11 aa, synthetic construct
  REGION 1..11: note = C11\29 VL CDR3
AAWDDSLSGYV

SEQ ID NO: 321 - protein, 10 aa, synthetic construct
  REGION 1..10: note = C1 VL CDR3
SSDTNNNTLV

SEQ ID NO: 322 - protein, 10 aa, synthetic construct
  REGION 1..10: note = C8 VL CDR3
SSYAGSGTWM

SEQ ID NO: 323 - protein, 11 aa, synthetic construct
  REGION 1..11: note = C17 VL CDR3
QQYNNWPPRYT

SEQ ID NO: 324 - protein, 11 aa, synthetic construct
  REGION 1..11: note = C18 VL CDR3
SSYTSSSTLFV

SEQ ID NO: 325 - protein, 10 aa, synthetic construct
  REGION 1..10: note = C34 VL CDR3
SSYAGSGKYV

SEQ ID NO: 326 - protein, 9 aa, synthetic construct
  REGION 1..9: note = C3 VL CDR3
QQYKGYPLT

SEQ ID NO: 327 - protein, 9 aa, synthetic construct
  REGION 1..9: note = C7\27 VL CDR3
QQYGSSPLT

SEQ ID NO: 328 - protein, 9 aa, synthetic construct
  REGION 1..9: note = C14 VL CDR3
QQYDDLPLT

SEQ ID NO: 329 - protein, 7 aa, synthetic construct
  REGION 1..7: note = C15 VL CDR3
LHYGSYT

SEQ ID NO: 330 - protein, 9 aa, synthetic construct
  REGION 1..9: note = C19 VL CDR3
LQDGDYPLT

SEQ ID NO: 331 - protein, 9 aa, synthetic construct
  REGION 1..9: note = C23 VL CDR3
QQYGNLPLT

SEQ ID NO: 332 - protein, 9 aa, synthetic construct
  REGION 1..9: note = C24 VL CDR3
LQYKTYPYT

SEQ ID NO: 333 - protein, 9 aa, synthetic construct
  REGION 1..9: note = C30 VL CDR3
QQNDNLPLT

SEQ ID NO: 334 - protein, 9 aa, synthetic construct
  REGION 1..9: note = C33 VL CDR3
QQGSTFPLA

SEQ ID NO: 335 - protein, 11 aa, synthetic construct
  REGION 1..11: note = C2 VL CDR3
VTWDTSLSAGV

SEQ ID NO: 336 - protein, 12 aa, synthetic construct
  REGION 1..12: note = C4 VL CDR3
AAWDDSLSGHGV

SEQ ID NO: 337 - protein, 11 aa, synthetic construct
  REGION 1..11: note = C12 VL CDR3
SAWDDSLSGYV

SEQ ID NO: 338 - protein, 11 aa, synthetic construct
  REGION 1..11: note = C21 VL CDR3
AAWDDSLSGWV

SEQ ID NO: 339 - protein, 10 aa, synthetic construct
  REGION 1..10: note = C26 VL CDR3
ATWDDDLNGV

SEQ ID NO: 340 - protein, 11 aa, synthetic construct
  REGION 1..11: note = C35 VL CDR3
GTWDSRLNIWV

SEQ ID NO: 341 - protein, 11 aa, synthetic construct
  REGION 1..11: note = C16\32 VL CDR3
SAWDDSLNGPV

SEQ ID NO: 342 - protein, 9 aa, synthetic construct
  REGION 1..9: note = C5 VL CDR3
QSYDSNNQV

SEQ ID NO: 343 - protein, 9 aa, synthetic construct
  REGION 1..9: note = C6 VL CDR3
QAWDGNAAI

SEQ ID NO: 344 - protein, 11 aa, synthetic construct
  REGION 1..11: note = C9 VL CDR3
SAWDDSLSAWV

SEQ ID NO: 345 - protein, 11 aa, synthetic construct
  REGION 1..11: note = C10 VL CDR3
QVWDSSSDHWV

SEQ ID NO: 346 - protein, 9 aa, synthetic construct
  REGION 1..9: note = C13 VL CDR3
MQGTHWPHT

SEQ ID NO: 347 - protein, 11 aa, synthetic construct
  REGION 1..11: note = C22 VL CDR3
QVWDSTSDHVV

SEQ ID NO: 348 - protein, 11 aa, synthetic construct
  REGION 1..11: note = C31 VL CDR3
SSWDDSLEGAQ

SEQ ID NO: 349 - protein, 5 aa, synthetic construct
  REGION 1..5: note = C2\8\20\25\28\35 VH CDR1
NAWMS

SEQ ID NO: 350 - protein, 5 aa, synthetic construct
  REGION 1..5: note = C11\29 VH CDR1
DYAMS

SEQ ID NO: 351 - protein, 5 aa, synthetic construct
  REGION 1..5: note = C1\19 VH CDR1
SYGMH

SEQ ID NO: 352 - protein, 5 aa, synthetic construct
  REGION 1..5: note = C17 VH CDR1
SYYMH

SEQ ID NO: 353 - protein, 7 aa, synthetic construct
  REGION 1..7: note = C18 VH CDR1
SGDYYWS

SEQ ID NO: 354 - protein, 5 aa, synthetic construct
  REGION 1..5: note = C34 VH CDR1
DTWMS

SEQ ID NO: 355 - protein, 5 aa, synthetic construct
  REGION 1..5: note = C3\10\24\33 VH CDR1
SYAIS

SEQ ID NO: 356 - protein, 5 aa, synthetic construct
  REGION 1..5: note = C7\23\27 VH CDR1
SYGIS

SEQ ID NO: 357 - protein, 7 aa, synthetic construct
  REGION 1..7: note = C14 VH CDR1
SSSHYWG

SEQ ID NO: 358 - protein, 5 aa, synthetic construct
  REGION 1..5: note = C15 VH CDR1
DYYIS

SEQ ID NO: 359 - protein, 5 aa, synthetic construct
  REGION 1..5: note = C5\30 VH CDR1
DYGMS

SEQ ID NO: 360 - protein, 5 aa, synthetic construct
  REGION 1..5: note = C4 VH CDR1
RYYMN

SEQ ID NO: 361 - protein, 5 aa, synthetic construct
  REGION 1..5: note = C12 VH CDR1
SYNIN

SEQ ID NO: 362 - protein, 5 aa, synthetic construct
  REGION 1..5: note = C21 VH CDR1
DYAMH

SEQ ID NO: 363 - protein, 5 aa, synthetic construct
  REGION 1..5: note = C26 VH CDR1
NFEMN

SEQ ID NO: 364 - protein, 5 aa, synthetic construct
  REGION 1..5: note = C32 VH CDR1
SYAMN

SEQ ID NO: 365 - protein, 5 aa, synthetic construct
  REGION 1..5: note = C13\16 VH CDR1
SYSMN

SEQ ID NO: 366 - protein, 5 aa, synthetic construct
  REGION 1..5: note = C6 VH CDR1
RYSMN

SEQ ID NO: 367 - protein, 5 aa, synthetic construct
  REGION 1..5: note = C9 VH CDR1
DYAMN

SEQ ID NO: 368 - protein, 5 aa, synthetic construct
  REGION 1..5: note = C22 VH CDR1
SYWIG

SEQ ID NO: 369 - protein, 5 aa, synthetic construct
  REGION 1..5: note = C31 VH CDR1
DYYMS

SEQ ID NO: 370 - protein, 19 aa, synthetic construct
  REGION 1..19: note = C8\20\25\28 VH CDR2
RIKSKTDGGTTDSAAPVKG

SEQ ID NO: 371 - protein, 19 aa, synthetic construct
  REGION 1..19: note = C11\29 VH CDR2
FIRSKAYGGTTEYAASVKG

SEQ ID NO: 372 - protein, 17 aa, synthetic construct
  REGION 1..17: note = C1 VH CDR2
VIWYDGSNKYYADSVKG

SEQ ID NO: 373 - protein, 17 aa, synthetic construct
  REGION 1..17: note = C17 VH CDR2
LINPTNGRTTYAQKFQG

SEQ ID NO: 374 - protein, 16 aa, synthetic construct
  REGION 1..16: note = C18 VH CDR2
YIHSTGTTYYNPSLKS

SEQ ID NO: 375 - protein, 19 aa, synthetic construct
  REGION 1..19: note = C34 VH CDR2
RIKSKTDGGTTNYAAPVKG

SEQ ID NO: 376 - protein, 17 aa, synthetic construct
  REGION 1..17: note = C3\10\24\33 VH CDR2
GIIPIFGTANYAQKFQG

SEQ ID NO: 377 - protein, 17 aa, synthetic construct
  REGION 1..17: note = C7\23\27 VH CDR2
WISAYNGNTNYAQKLQG

SEQ ID NO: 378 - protein, 16 aa, synthetic construct
  REGION 1..16: note = C14 VH CDR2
SIYYSGSTYYNPSLKS

SEQ ID NO: 379 - protein, 17 aa, synthetic construct
  REGION 1..17: note = C15 VH CDR2
YISGSSTYTDFADSVKG

SEQ ID NO: 380 - protein, 17 aa, synthetic construct
  REGION 1..17: note = C19 VH CDR2
VISYDGSNKYYADSVKG

SEQ ID NO: 381 - protein, 17 aa, synthetic construct
  REGION 1..17: note = C30 VH CDR2
GINWNGGSTGYADSVKG

SEQ ID NO: 382 - protein, 19 aa, synthetic construct
  REGION 1..19: note = C2\35 VH CDR2
RIKSKTDGGTTDYAAPVKG

SEQ ID NO: 383 - protein, 17 aa, synthetic construct
  REGION 1..17: note = C4 VH CDR2
AIDPSDGDTTYGQKFQG

SEQ ID NO: 384 - protein, 17 aa, synthetic construct
  REGION 1..17: note = C12 VH CDR2
SISSSSSYRYYADSVKG

SEQ ID NO: 385 - protein, 17 aa, synthetic construct
  REGION 1..17: note = C21 VH CDR2
GISWNSGSIGYADSVKG

SEQ ID NO: 386 - protein, 17 aa, synthetic construct
  REGION 1..17: note = C26 VH CDR2
YISATTSATSYADSVKG

SEQ ID NO: 387 - protein, 17 aa, synthetic construct
  REGION 1..17: note = C32 VH CDR2
DISSSSSYIYYADSVKG

SEQ ID NO: 388 - protein, 17 aa, synthetic construct
  REGION 1..17: note = C6\16 VH CDR2
YISSSSSTIYYADSVKG

SEQ ID NO: 389 - protein, 17 aa, synthetic construct
  REGION 1..17: note = C5 VH CDR2
GINWNGGRTGYADSVKG

SEQ ID NO: 390 - protein, 19 aa, synthetic construct
  REGION 1..19: note = C9 VH CDR2
FIRSKASGGTTDYAASVKG

SEQ ID NO: 391 - protein, 17 aa, synthetic construct
  REGION 1..17: note = C13 VH CDR2
FISHDASKKFYADSVKG

SEQ ID NO: 392 - protein, 17 aa, synthetic construct
  REGION 1..17: note = C22 VH CDR2
IINPSGGSTSYAQKFQG

SEQ ID NO: 393 - protein, 17 aa, synthetic construct
  REGION 1..17: note = C31 VH CDR2
YISSSGSTIYYADSVKG

SEQ ID NO: 394 - protein, 12 aa, synthetic construct
  REGION 1..12: note = C8\20\26\28 VH CDR3
YYFYSSGDMTDY

SEQ ID NO: 395 - protein, 15 aa, synthetic construct
  REGION 1..15: note = C11\29 VH CDR3
DIGYYGSGSYSPFDY

SEQ ID NO: 396 - protein, 14 aa, synthetic construct
  REGION 1..14: note = C1 VH CDR3
DRDGFFLPMYYFDY

SEQ ID NO: 397 - protein, 13 aa, synthetic construct
  REGION 1..13: note = C17 VH CDR3
GSPPHIFDPDFDY

SEQ ID NO: 398 - protein, 9 aa, synthetic construct
  REGION 1..9: note = C18 VH CDR3
GGVGTIFNY

SEQ ID NO: 399 - protein, 8 aa, synthetic construct
  REGION 1..8: note = C34 VH CDR3
GDYPLFAY

SEQ ID NO: 400 - protein, 13 aa, synthetic construct
  REGION 1..13: note = C3 VH CDR3
DSGWFGPRYYFDY

SEQ ID NO: 401 - protein, 19 aa, synthetic construct
  REGION 1..19: note = C7\27 VH CDR3
DPYDDYGGNSRDEEDAFDI

SEQ ID NO: 402 - protein, 12 aa, synthetic construct
  REGION 1..12: note = C14 VH CDR3
RVWVWPTYGMDV

SEQ ID NO: 403 - protein, 8 aa, synthetic construct
  REGION 1..8: note = C15 VH CDR3
DRRGRFDP

SEQ ID NO: 404 - protein, 14 aa, synthetic construct
  REGION 1..14: note = C19 VH CDR3
DPSLIQYYYYGMDV

SEQ ID NO: 405 - protein, 16 aa, synthetic construct
  REGION 1..16: note = C23 VH CDR3
DRIAAAEVYYYYGMDV

SEQ ID NO: 406 - protein, 16 aa, synthetic construct
  REGION 1..16: note = C24 VH CDR3
DSPSGSTNYYYYYMDV

SEQ ID NO: 407 - protein, 17 aa, synthetic construct
  REGION 1..17: note = C30 VH CDR3
DRAPDYGDYLQVGTTDY

SEQ ID NO: 408 - protein, 13 aa, synthetic construct
  REGION 1..13: note = C33 VH CDR3
GLDNWNDVGWFDP

SEQ ID NO: 409 - protein, 11 aa, synthetic construct
  REGION 1..11: note = C2 VH CDR3
DPHGYYYGMDV

SEQ ID NO: 410 - protein, 12 aa, synthetic construct
  REGION 1..12: note = C4 VH CDR3
DWELTNSYGLDV

SEQ ID NO: 411 - protein, 12 aa, synthetic construct
  REGION 1..12: note = C12 VH CDR3
DKTGGYGTAFDY

SEQ ID NO: 412 - protein, 16 aa, synthetic construct
  REGION 1..16: note = C21 VH CDR3
GRYVDIVATINDAFDI

SEQ ID NO: 413 - protein, 16 aa, synthetic construct
  REGION 1..16: note = C26 VH CDR3
VRDGYNFGYYYYYMDV

SEQ ID NO: 414 - protein, 14 aa, synthetic construct
  REGION 1..14: note = C35 VH CDR3
EAAGFYYYYYGMDV

SEQ ID NO: 415 - protein, 16 aa, synthetic construct
  REGION 1..16: note = C32 VH CDR3
DLYSGYDYGYYYGMDV

SEQ ID NO: 416 - protein, 15 aa, synthetic construct
  REGION 1..15: note = C16 VH CDR3
DIYGDWDYYYYGMDV

SEQ ID NO: 417 - protein, 13 aa, synthetic construct
  REGION 1..13: note = C5 VH CDR3
ARGSGSYFGYMDV

SEQ ID NO: 418 - protein, 14 aa, synthetic construct
  REGION 1..14: note = C6 VH CDR3
DGYGGNSDYYGMDV

SEQ ID NO: 419 - protein, 12 aa, synthetic construct
  REGION 1..12: note = C9 VH CDR3
ALRGYSYGLFDY

SEQ ID NO: 420 - protein, 15 aa, synthetic construct
  REGION 1..15: note = C10 VH CDR3
EKWGYYGDYYYGMDV

SEQ ID NO: 421 - protein, 9 aa, synthetic construct
  REGION 1..9: note = C13 VH CDR3
DRNWGFSDF

SEQ ID NO: 422 - protein, 10 aa, synthetic construct
  REGION 1..10: note = C22 VH CDR3
VVTPYYPLTN

SEQ ID NO: 423 - protein, 17 aa, synthetic construct
  REGION 1..17: note = C31 VH CDR3
GHQYYDFWSGYSNWFDP

SEQ ID NO: 424 - protein, 110 aa, synthetic construct
  REGION 1..110: note = C1 VL
QSALTQPASVSGSPGQSITISCTGTSSDIGAYNYVSWYQQHPGKAPKLIIYDVSHRPSGVSNRFSGSKSGNTASLTISGLQSEDEADYYCSSDTNNNTLVFGVGTKLTVL

SEQ ID NO: 425 - protein, 110 aa, synthetic construct
  REGION 1..110: note = C2 VL
QSVVTQPPSVSAAPGQKVTISCSGSSSNIGNNYVSWYQQFPGTAPKLLIYDNNKRPSGIPDRFSGSKSGTSGTLGITGLQTGDEADYYCVTWDTSLSAGVFGGGTKLTVL

SEQ ID NO: 426 - protein, 107 aa, synthetic construct
  REGION 1..107: note = C3 VL
AIQMTQSPSSLSASVGDRVTITCRASQGIGTYLAWFQQKPGKAPKSLIYAASNLQSGVPSKFSGSGSGTDFTLTISNLQPEDFATYYCQQYKGYPLTFGGGTKLEIK

SEQ ID NO: 427 - protein, 111 aa, synthetic construct
  REGION 1..111: note = C4 VL
QSALTQPPSASGTPGQRVTISCSGSSSNIGSNYVNWYQQLPGTAPKLLIYRNNQRPSGVPDRFSGSKSGTSASLAISGLRSEDEADYYCAAWDDSLSGHGVFGTGTELTVL

SEQ ID NO: 428 - protein, 110 aa, synthetic construct
  REGION 1..110: note = C5 VL
NFMLTQPHSVSESPGKTVTLSCTRSSGSIAGSYVQWYQQRPGSSPTTVIFQDNQRPSGVPDRFSGSIDKSSNSASLTISGLKTEDEADYYCQSYDSNNQVFGGGTKLTVL

SEQ ID NO: 429 - protein, 106 aa, synthetic construct
  REGION 1..106: note = C6 VL
SYELTQPPSVSVSPGQTARIPCSGADLGDQYVSWYQHQPGQSPLLVIYEDDKRPSGIPERFSGSNSGNTATLTISGTQAMDEADYYCQAWDGNAAIFGGGTKLTVL

SEQ ID NO: 430 - protein, 108 aa, synthetic construct
  REGION 1..108: note = C7 VL
EIVLTQSPGTLSLSPGEKATLSCRASQSVSSSYLAWYQQKPGQAPRLLIYGASSRATGIPDRFSGSGSGTDFTLTISRLEPEDFAVYYCQQYGSSPLTFGGGTKLEIK

SEQ ID NO: 431 - protein, 110 aa, synthetic construct
  REGION 1..110: note = C8 VL
QSALTQPPSVSGSPGQSITISCTGTSTDIGGYDFVSWYQQHPGQAPKLIMFDVSSRPSGISNRFSGSKSGDTASLTISGLQGDDEADYYCSSYAGSGTWMFGGGTKLTVL

SEQ ID NO: 432 - protein, 110 aa, synthetic construct
  REGION 1..110: note = C9 VL
QSVLTQPPSASGTPGQRVTISCSGSNSNIENNYVYWYQHLPGTAPKRLIYQNNQRPSGVPDRFSGSKSGTSASLAISGLRSEDEADYYCSAWDDSLSAWVFGGGTELTVL

SEQ ID NO: 433 - protein, 108 aa, synthetic construct
  REGION 1..108: note = C10 VL
SYELTQPPSVSVAPGKTARITCGGNNIGSKSVHWYQQKPGQAPVLVVYDDSDRPSGIPERFSGSNSGNTATLTISRVEAGDEADYYCQVWDSSSDHWVFGGGTKLTVL

SEQ ID NO: 434 - protein, 110 aa, synthetic construct
  REGION 1..110: note = C11 VL
QSVVTQPPSASGTPGQRVTISCSGSSSNIGSNYVYWYQQLPGTAPKLLIYRNNQRPSGVPDRFSGSKSGTSASLAISGLRSEDEADYYCAAWDDSLSGYVFGTGTKLTVL

SEQ ID NO: 435 - protein, 110 aa, synthetic construct
  REGION 1..110: note = C12 VL
QSVLTQPPSVSAAPGQKVTISCSGSSSNIGNNYVSWYQQLPGTAPKLLIFDDNKRPSGIPDRFSGSLSGTSASLAISGLQSEDDADYYCSAWDDSLSGYVFGTGTKLTVL

SEQ ID NO: 436 - protein, 112 aa, synthetic construct
  REGION 1..112: note = C13 VL
DVVMTQTPLSLPVTLGQPASISCRSSQGLVFSDGVTYLNWFQQRPGQSPRRLIYKVSNRDSGVPDRFSGSGSGTDFTLKISRVEAEDVGIYYCMQGTHWPHTFGQGTKLEIK

SEQ ID NO: 437 - protein, 107 aa, synthetic construct
  REGION 1..107: note = C14 VL
DIRMTQSPSSLSASVGDRVTITCQASQDITNYLNWYHQKPGKAPKLLIYDASNLETGVPSRFSGGGSGTDFTFTISSLQSEDIGTYYCQQYDDLPLTFGGGTKVEIK

SEQ ID NO: 438 - protein, 105 aa, synthetic construct
  REGION 1..105: note = C15 VL
DIQLTQSPSTLSASVGDRVTISCRASQSISSWLAWYQHKPGKAPKLLIYKTSALEDGVPSRFSGSGSGTEFTLTISSLQPDDFATYFCLHYGSYTFGQGTKVDIK

SEQ ID NO: 439 - protein, 110 aa, synthetic construct
  REGION 1..110: note = C16 VL
QSVVTQPPSASGTPGQRVTISCSGSSSNIEGNTVSWYQQFPGAAPKLLIYSNSYRASGVPDRFSGSKSGTSASLAISELQSEDEADYYCSAWDDSLNGPVFGGGTELTVL

SEQ ID NO: 440 - protein, 111 aa, synthetic construct
  REGION 1..111: note = C17 VL
QSALTQPASVSGSLGQSITISCTGTSSDVGTYDYVSWYQQHPGKAPKLMIYDVTYRPSGVSHRFSGSKSGNTASLTISGLQADDEADYYCQQYNNWPPRYTFGQGTKVEIK

SEQ ID NO: 441 - protein, 111 aa, synthetic construct
  REGION 1..111: note = C18 VL
QSALTQPASVSGSPGQSITISCTGTSSDVGGYNYVSWYQQHPGKAPKLMIYDVSNRPSGVSNRFSGSKSGNTASLTISGLQAEDEADYYCSSYTSSSTLFVFGTGTELTVL

SEQ ID NO: 442 - protein, 107 aa, synthetic construct
  REGION 1..107: note = C19 VL
DIRMTQSPSSLSASVGDRVTITCRASQDIRHDLGWYQQKPGKAPSLLMYATSTLQSGVPSRFSGSGSGTHFTLTISSLKPEDSATYYCLQDGDYPLTFGGGTKLEIK

SEQ ID NO: 443 - protein, 110 aa, synthetic construct
  REGION 1..110: note = C20 VL
QSALTQPPSASGSPGQSVTISCTGTSSDVGGYNYVSWYQQHPGKAPKLIIYEVSERPSGVPDRFSGSKSDNTASLTVSGLQAEDEADYYCSSYAGSNILVFGGGTKLTVL

SEQ ID NO: 444 - protein, 110 aa, synthetic construct
  REGION 1..110: note = C21 VL
QSVLTQPPSASGTPGQRVTISCSGSSSNVGGNPVYWYRQVPTAAPKLLVYGHNQRPPRDPDRFSGSKSGTSASLAISGLRSEDEADYYCAAWDDSLSGWVFGGGTELTVL

SEQ ID NO: 445 - protein, 108 aa, synthetic construct
  REGION 1..108: note = C22 VL
SYELTQPPSVSVAPGKTARITCGANNIETKSVHWYRQRPGQAPILVIYYDSDRPSGIPERFSGSTSGDTATLTISRVEAEDEADYYCQVWDSTSDHVVFGEGTKLTVL

SEQ ID NO: 446 - protein, 107 aa, synthetic construct
  REGION 1..107: note = C23 VL
DILMTQSPSSLSASVGDRVTITCQASQDISNYLNWYQQKPGKAPKLLIYDASNLETGVPSRFSGSGSGTGFSFTISSLQPEDFATYYCQQYGNLPLTFGGGTKLEIK

SEQ ID NO: 447 - protein, 107 aa, synthetic construct
  REGION 1..107: note = C24 VL
DIQMTQSPSSLSASVGDRVTITCRASQSISSYLNWYQQKPGKAPKLLIHAASSLQSGVPSKFSGSGSGTDFTLTISSLQPEDFATYYCLQYKTYPYTFGPGTKVEIK

SEQ ID NO: 448 - protein, 110 aa, synthetic construct
  REGION 1..110: note = C25 VL
QSALTQPASVSGPPGQSITISCTGTSSDVGGYNYVSWYQQHPGKAPKLMIYDVSNRPSGVSNRFSGSKSGNTASLTISGLQAEDEADYYCSSYTSSSTWVFGGGTKLTVL

SEQ ID NO: 449 - protein, 109 aa, synthetic construct
  REGION 1..109: note = C26 VL
QSVLTQPPSASGTPGQRVTISCSGSRSNIGSNTVSWYQQFPGTAPKLLIYLNNQRPSGVPDRFSGSKSGTSASLAISGLQSEDEAEYYCATWDDDLNGVFGGGTKLTVL

SEQ ID NO: 450 - protein, 108 aa, synthetic construct
  REGION 1..108: note = C27 VL
EIVLTQSPGTVSLSPGERATLSCRASQRVSATYLAWYQQKPGQAPRLLMYGGSRRATGIPDRFSGSGSGTDFTLTIRRLEPEDSAVYYCQQYGSSPLTFGGGTKLEIK

SEQ ID NO: 451 - protein, 110 aa, synthetic construct
  REGION 1..110: note = C28 VL
QSALTQPASVSGSPGQSITISCTGTSSDVGGYNYVSWYQQHPGKAPKLMIYDVSNRPSGVSNRFSGSKSGNTASLTISGLQAEDEADYYCSSYTSSSNWVFGGGTELTVL

SEQ ID NO: 452 - protein, 110 aa, synthetic construct
  REGION 1..110: note = C29 VL
QPVLTQPPSASGTPGQRVTISCSGSSSNIGSNYVYWYQQLPGTAPKLLIYRNNQRPSGVPDRFSGSKSGTSASLAISGLRSEDEADYYCAAWDDSLSGYVFGTGTKVTVL

SEQ ID NO: 453 - protein, 107 aa, synthetic construct
  REGION 1..107: note = C30 VL
AIRLTQSPSSLSASVGDRVTITCQASQNINNYLNWYQQKSGKAPKLLIYDASNLEAGVPSRFSGSASGTDFTFTISSLQPEDIATYYCQQNDNLPLTFGQGTRLEIK

SEQ ID NO: 454 - protein, 110 aa, synthetic construct
  REGION 1..110: note = C31 VL
QPVLTQPPSMSGTPGQRVTISCSGGNSNIGDNSVSWYQQLPGTAPKLLIYNNNQRPLGVPDRFSGSKSGTSASLAIRGLQSEDEAHYYCSSWDDSLEGAQFGGGTKVTVL

SEQ ID NO: 455 - protein, 110 aa, synthetic construct
  REGION 1..110: note = C32 VL
QSVVTQPPSASGTPGQRVTISCSGSSSNIEGNTVSWYQQFPGAAPKLLIYSNSYRASGVPDRFSGSKSGTSASLAISELQSEDEADYYCSAWDDSLNGPVFGGGTKVTVL

SEQ ID NO: 456 - protein, 107 aa, synthetic construct
  REGION 1..107: note = C33 VL
DIRLTQSPSSLSASVGDTITITCRASQDISSWIAWYQQKPGTAPRLLIYAASSLQSGVPSRFSGSGSGTDFTLTINSLHPEDFATYYCQQGSTFPLAFGGGTKVEIK

SEQ ID NO: 457 - protein, 110 aa, synthetic construct
  REGION 1..110: note = C34 VL
QSALTQPPSASGSPGQSVTISCTGTRSDVGAYNYVSWYQHHPGKAPKLMLYDVSKRPSGVSDRFSGSKSGNTASLTVSGLQSEDEANYYCSSYAGSGKYVFGSGTELTVL

SEQ ID NO: 458 - protein, 110 aa, synthetic construct
  REGION 1..110: note = C35 VL
QSVVTQPPSVSAASGQKVTISCSGSSPNIGNNYVSWYQHLPGTAPKLLIYDNNKRPSGIPDRFSGSKSGTSVTLGITGLQTGDEADYYCGTWDSRLNIWVFGGGTKLTVL

SEQ ID NO: 459 - protein, 123 aa, synthetic construct
  REGION 1..123: note = C1 VH
EVHLVESGGGVVQPGRSLRLSCAASGFTFSSYGMHWVRQAPGKGLEWVAVIWYDGSNKYYADSVKGRFTISRDNSKNTLYLQMNSLRAEDTAVYYCARDRDGFFLPMYYFDYWGQGTLVTVSS

SEQ ID NO: 460 - protein, 122 aa, synthetic construct
  REGION 1..122: note = C2 VH
QITLKESGGGLVKPGGSLRLSCAASGFTFSNAWMSWVRQAPGKGLEWVGRIKSKTDGGTTDYAAPVKGRFTISRDDSKNTLYLQMNSLKTEDTAVYYCTTDPHGYYYGMDVWGQGTTVTVSS

SEQ ID NO: 461 - protein, 122 aa, synthetic construct
  REGION 1..122: note = C3 VH
QVQLVQSGAEVKKPGSSVKVSCKASGGTFSSYAISWVRQAPGQGLEWMGGIIPIFGTANYAQKFQGRVTITADESTSTAYMELSSLRSEDTAVYYCARDSGWFGPRYYFDYWGQGTLVTVSS

SEQ ID NO: 462 - protein, 121 aa, synthetic construct
  REGION 1..121: note = C4 VH
QVQLVQSGPEVKKPGASVKVSCKASGYDFIRYYMNWVRQAPGQGPEWMGAIDPSDGDTTYGQKFQGRVTLTRDTFTSTVYMELSSLRSEDTAVYYCARDWELTNSYGLDVWGQGTTVTVSS

SEQ ID NO: 463 - protein, 122 aa, synthetic construct
  REGION 1..122: note = C5 VH
EVHLVESGGGVVRPGGSLRLSCAASGFTFGDYGMSWVRQAPGKGLEWVSGINWNGGRTGYADSVKGRFTISRDNAKNSLYLQMNSLRAEDTALYYCARARGSGSYFGYMDVWGKGTTVTVSS

SEQ ID NO: 464 - protein, 123 aa, synthetic construct
  REGION 1..123: note = C6 VH
QVQLVQSGGGSVQPGGSLRLSCAASGFTFTRYSMNWVRQAPGKGLEWVSYISSSSSTIYYADSVKGRFTISRDNAKNSLYLQMNSLRDEDTAVYYCARDGYGGNSDYYGMDVWGQGTTVTVSS

SEQ ID NO: 465 - protein, 128 aa, synthetic construct
  REGION 1..128: note = C7 VH
QVQLVQSGAEVKKPGASVKVSCKASGYTFTSYGISWVRQAPGQGLEWMGWISAYNGNTNYAQKLQGRVTMTTDTSTSTAYMELRSLRSDDTAVYYCARDPYDDYGGNSRDEEDAFDIWGQGTMVTVSS

SEQ ID NO: 466 - protein, 123 aa, synthetic construct
  REGION 1..123: note = C8 VH
EVQLVESGGGLVKPGGSLRLSCAASGFTFSNAWMSWVRQAPGKGLEWVGRIKSKTDGGTTDSAAPVKGRFTISRDDSKNTLYLQMNSLKTEDTAVYYCTTYYFYSSGDMTDYWGQGTLVTVSS

SEQ ID NO: 467 - protein, 123 aa, synthetic construct
  REGION 1..123: note = C9 VH
EVHLVESGGGLVQPGRSLRLSCTASGFTFGDYAMNWVRQAPGKGLEWVGFIRSKASGGTTDYAASVKGRFTISRDDSKSIAYLQMNSLKTEDTAVYYCTRALRGYSYGLFDYWGQGTLVTVSS

SEQ ID NO: 468 - protein, 124 aa, synthetic construct
  REGION 1..124: note = C10 VH
QVQLVQSGAEVKKPGSSVKVSCKASGGTFSSYAISWVRQAPGQGLEWMGGIIPIFGTANYAQKFQGRVTITADESTSTAYMELSSLRSEDTAVYYCAREKWGYYGDYYYGMDVWGQGTTVTVSS

SEQ ID NO: 469 - protein, 126 aa, synthetic construct
  REGION 1..126: note = C11 VH
EVQLVESGGGLVQPGRSLRLSCTASGFTFGDYAMSWVRQAPGKGLEWVGFIRSKAYGGTTEYAASVKGRFTISRDDSKSIAYLQMNSLKTEDTAVYYCTRDIGYYGSGSYSPFDYWGQGTLVTVSS

SEQ ID NO: 470 - protein, 121 aa, synthetic construct
  REGION 1..121: note = C12 VH
QVQLVQSGGGLVKPGGSLRLSCAASGFTFSSYNINWVRQAPGKGPEWVSSISSSSSYRYYADSVKGRFTISRDNAKNSLYLQMNSLRAEDTAVYYCVRDKTGGYGTAFDYWGQGTLVTVSS

SEQ ID NO: 471 - protein, 118 aa, synthetic construct
  REGION 1..118: note = C13 VH
EVQLVESGGGLVKPGGSLRLSCAASGFTFSSYSMNWVRQAPGKGLEWVAFISHDASKKFYADSVKGRFTLSRDNSKNTLYLEMNSLGAEDTALYYCGRDRNWGFSDFWGQGTLVTVSS

SEQ ID NO: 472 - protein, 122 aa, synthetic construct
  REGION 1..122: note = C14 VH
QVQLQESGPGLVKPSETLSLTCTVSGGSISSSSHYWGWIRQPPGKGLEWIGSIYYSGSTYYNPSLKSRVTISVDTSKNQFSLKLSSVTAADTAVYYCARRVWVWPTYGMDVWGQGTTVTVSS

SEQ ID NO: 473 - protein, 117 aa, synthetic construct
  REGION 1..117: note = C15 VH
EVQLVESGGGLVNPGGSLRLSCEASGFTFSDYYISWIRQAPGKGLEWISYISGSSTYTDFADSVKGRFTISRDNAKNTVFLQMNSLRAEDTAVYYCARDRRGRFDPWGQGTLVTVSS

SEQ ID NO: 474 - protein, 124 aa, synthetic construct
  REGION 1..124: note = C16 VH
QVQLQESGGGLVQPGGSLRLSCAASGFTFSSYSMNWVRQAPGKGLEWVSYISSSSSTIYYADSVKGRFTISRDNAKNSLYLQMNSLRAEDTAVYYCARDIYGDWDYYYYGMDVWGQGTTVTVSS

SEQ ID NO: 475 - protein, 122 aa, synthetic construct
  REGION 1..122: note = C17 VH
QVQLVQSGAEVEKPGASVKLSCTASGYNFNSYYMHWVRLTPGQGLEWMGLINPTNGRTTYAQKFQGRVTMTGDTSTRTVYLALSSLRSEDSALYYCARGSPPHIFDPDFDYWGQGTLVTVSS

SEQ ID NO: 476 - protein, 119 aa, synthetic construct
  REGION 1..119: note = C18 VH
QVQLQESGPGLVKPSQTLSLTCTVSGGSISSGDYYWSWIRQSPGKGLEWIGYIHSTGTTYYNPSLKSRLTISLDTSKNQFSLKLNSVTAADTAVYYCARGGVGTIFNYWGQGTLVTVSS

SEQ ID NO: 477 - protein, 123 aa, synthetic construct
  REGION 1..123: note = C19 VH
QVQLVQSGGGVVQPGRSLRLSCAASGFTFSSYGMHWVRQAPGKGLEWVAVISYDGSNKYYADSVKGRFTISRDNSKNTLYLQMNSLRAEDTAVYYCAKDPSLIQYYYYGMDVWGQGTMVTVSS

SEQ ID NO: 478 - protein, 123 aa, synthetic construct; identical to SEQ ID NO: 466
  REGION 1..123: note = C20 VH

SEQ ID NO: 479 - protein, 125 aa, synthetic construct
  REGION 1..125: note = C21 VH
EVQLVESGGGLVQPGRSLRLSCAASGFTFDDYAMHWVRQAPGKGLEWVSGISWNSGSIGYADSVKGRFTISRDNAKNSLYLQMNSLRAEDTALYYCAKGRYVDIVATINDAFDIWGQGTMVTVSS

SEQ ID NO: 480 - protein, 119 aa, synthetic construct
  REGION 1..119: note = C22 VH
EVQLVESGAEVKKPGESLKISCKGSGYSFTSYWIGWVRQMPGKGLEWMGIINPSGGSTSYAQKFQGRVTMTRDTSTSTVYMELSSLRSEDTAVYYCARVVTPYYPLTNWGQGTLVTVSS

SEQ ID NO: 481 - protein, 125 aa, synthetic construct
  REGION 1..125: note = C23 VH
QVQLVQSGAEVKKPGASVKVSCKASGYTFTSYGISWVRQAPGQGLEWMGWISAYNGNTNYAQKLQGRVTMTTDTSTSTAYMELRSLRSDDTAVYYCARDRIAAAEVYYYYGMDVWGQGTTVTVSS

SEQ ID NO: 482 - protein, 125 aa, synthetic construct
  REGION 1..125: note = C24 VH
QVQLVQSGAEVKKPGSSVKVSCKASGGTFSSYAISWVRQAPGQGLEWMGGIIPIFGTANYAQKFQGRVTITADESTSTAYMELSSLRSEDTAVYYCARDSPSGSTNYYYYYMDVWGKGTTVTVSS

SEQ ID NO: 483 - protein, 123 aa, synthetic construct
  REGION 1..123: note = C25 VH
EVHLVESGGGLVKPGGSLRLSCAASGFTFSNAWMSWVRQAPGKGLEWVGRIKSKTDGGTTDSAAPVKGRFTISRDDSKNTLYLQMNSLKTEDTAVYYCTTYYFYSSGDMTDYWGQGTLVTVSS

SEQ ID NO: 484 - protein, 125 aa, synthetic construct
  REGION 1..125: note = C26 VH
EVQLVESGGGLVQPGGSLRLSCAASGFTLSNFEMNWVRQAPGRGLEWVSYISATTSATSYADSVKGRFTISRDNAKNSLYLQMNSLRAEDTAVYYCARVRDGYNFGYYYYYMDVWGKGTTVTVSS

SEQ ID NO: 485 - protein, 128 aa, synthetic construct
  REGION 1..128: note = C27 VH
QVQLVQSGSELKKPGASVKVSCKASGYTFTSYGISWVRQAPGQGLEWMGWISAYNGNTNYAQKLQGRVTMTTDTSTSTAYMELRSLRSDDTAVYYCARDPYDDYGGNSRDEEDAFDIWGQGTTVTVSS

SEQ ID NO: 486 - protein, 123 aa, synthetic construct; identical to SEQ ID NO: 483
  REGION 1..123: note = C28 VH

SEQ ID NO: 487 - protein, 126 aa, synthetic construct
  REGION 1..126: note = C29 VH
EVHLVESGGGLVQPGRSLRLSCTASGFTFGDYAMSWVRQAPGKGLEWVGFIRSKAYGGTTEYAASVKGRFTISRDDSKSIAYLQMNSLKTEDTAVYYCTRDIGYYGSGSYSPFDYWGQGTLVTVSS

SEQ ID NO: 488 - protein, 126 aa, synthetic construct
  REGION 1..126: note = C30 VH
EVQLVESGGGVVRPGGSLRLSCAASGFTFGDYGMSWVRQAPGKGLEWVSGINWNGGSTGYADSVKGRFTISRDNAKNSLYLQMNSLRAEDTALYYCARDRAPDYGDYLQVGTTDYWGQGTLVTVSS

SEQ ID NO: 489 - protein, 126 aa, synthetic construct
  REGION 1..126: note = C31 VH
EVQLVESGGGLVKPGGSLRLSCAASGFTFSDYYMSWIRQAPGKGLEWVSYISSSGSTIYYADSVKGRFTISRDNAKNSLYLQMNSLRAEDTAVYYCARGHQYYDFWSGYSNWFDPWGQGTLVTVSS

SEQ ID NO: 490 - protein, 125 aa, synthetic construct
  REGION 1..125: note = C32 VH
EVQLVESGGGLVQPGGSLRLSCAASGFTFTSYAMNWVRQAPGKGLEWVSDISSSSSYIYYADSVKGRFTISRDNAKNSLYLQMNSLRAEDTAVYYCARDLYSGYDYGYYYGMDVWGQGTTVTVSS

SEQ ID NO: 491 - protein, 122 aa, synthetic construct
  REGION 1..122: note = C33 VH
QVQLVQSGAEVKKPGSSVKVSCKASGGTFSSYAISWVRQAPGQGLEWMGGIIPIFGTANYAQKFQGRVTITADESTSTAYMELSSLRSEDTAVYYCARGLDNWNDVGWFDPWGQGTLVTVSS

SEQ ID NO: 492 - protein, 119 aa, synthetic construct
  REGION 1..119: note = C34 VH
EVHLVESGGGLVKPGGSLRLSCAASGFTFSDTWMSWVRQAPGKGLEWVGRIKSKTDGGTTNYAAPVKGRFTISRDDSKTTLFLQMNSLKTEDTAVYYCTGGDYPLFAYWGQGALVTVSS

SEQ ID NO: 493 - protein, 125 aa, synthetic construct
  REGION 1..125: note = C35 VH
EVHLVESGGGLVKPGGSLRLSCAASGFTFSNAWMSWVRQAPGKGLEWVGRIKSKTDGGTTDYAAPVKGRFTISRDDSKNTLYLQMNSLKTEDTAVYYCTTEAAGFYYYYYGMDVWGQGTTVTVSS

SEQ ID NO: 494 - protein, 491 aa, synthetic construct
  REGION 1..491: note = C5 CAR
MALPVTALLLPLALLLHAARPNFMLTQPHSVSESPGKTVTLSCTRSSGSIAGSYVQWYQQRPGSSPTTVIFQDNQRPSGVPDRFSGSIDKSSNSASLTISGLKTEDEADYYCQSYDSNNQVFGGGTKLTVLGGGGSGGGGSGGGGSEVHLVESGGGVVRPGGSLRLSCAASGFTFGDYGMSWVRQAPGKGLEWVSGINWNGGRTGYADSVKGRFTISRDNAKNSLYLQMNSLRAEDTALYYCARARGSGSYFGYMDVWGKGTTVTVSSTTTPAPRPPTPAPTIASQPLSLRPEACRPAAGGAVHTRGLDFACDIYIWAPLAGTCGVLLLSLVITLYCKRGRKKLLYIFKQPFMRPVQTTQEEDGCSCRFPEEEEGGCELRVKFSRSADAPAYKQGQNQLYNELNLGRREEYDVLDKRRGRDPEMGGKPRRKNPQEGLYNELQKDKMAEAYSEIGMKGERRRGKGHDGLYQGLSTATKDTYDALHMQALPPR

SEQ ID NO: 495 - protein, 495 aa, synthetic construct
  REGION 1..495: note = C7 CAR
MALPVTALLLPLALLLHAARPEIVLTQSPGTLSLSPGEKATLSCRASQSVSSSYLAWYQQKPGQAPRLLIYGASSRATGIPDRFSGSGSGTDFTLTISRLEPEDFAVYYCQQYGSSPLTFGGGTKLEIKGGGGSGGGGSGGGGSQVQLVQSGAEVKKPGASVKVSCKASGYTFTSYGISWVRQAPGQGLEWMGWISAYNGNTNYAQKLQGRVTMTTDTSTSTAYMELRSLRSDDTAVYYCARDPYDDYGGNSRDEEDAFDIWGQGTMVTVSSTTTPAPRPPTPAPTIASQPLSLRPEACRPAAGGAVHTRGLDFACDIYIWAPLAGTCGVLLLSLVITLYCKRGRKKLLYIFKQPFMRPVQTTQEEDGCSCRFPEEEEGGCELRVKFSRSADAPAYKQGQNQLYNELNLGRREEYDVLDKRRGRDPEMGGKPRRKNPQEGLYNELQKDKMAEAYSEIGMKGERRRGKGHDGLYQGLSTATKDTYDALHMQALPPR

SEQ ID NO: 496 - protein, 494 aa, synthetic construct
  REGION 1..494: note = C11 CAR
ALPVTALLLPLALLLHAARPQSVVTQPPSASGTPGQRVTISCSGSSSNIGSNYVYWYQQLPGTAPKLLIYRNNQRPSGVPDRFSGSKSGTSASLAISGLRSEDEADYYCAAWDDSLSGYVFGTGTKLTVLGGGGSGGGGSGGGGSEVQLVESGGGLVQPGRSLRLSCTASGFTFGDYAMSWVRQAPGKGLEWVGFIRSKAYGGTTEYAASVKGRFTISRDDSKSIAYLQMNSLKTEDTAVYYCTRDIGYYGSGSYSPFDYWGQGTLVTVSSTTTPAPRPPTPAPTIASQPLSLRPEACRPAAGGAVHTRGLDFACDIYIWAPLAGTCGVLLLSLVITLYCKRGRKKLLYIFKQPFMRPVQTTQEEDGCSCRFPEEEEGGCELRVKFSRSADAPAYKQGQNQLYNELNLGRREEYDVLDKRRGRDPEMGGKPRRKNPQEGLYNELQKDKMAEAYSEIGMKGERRRGKGHDGLYQGLSTATKDTYDALHMQALPPR

SEQ ID NO: 497 - protein, 248 aa, synthetic construct
  REGION 1..248: note = C1 scFv
QSALTQPASVSGSPGQSITISCTGTSSDIGAYNYVSWYQQHPGKAPKLIIYDVSHRPSGVSNRFSGSKSGNTASLTISGLQSEDEADYYCSSDTNNNTLVFGVGTKLTVLGGGGSGGGGSGGGGSEVHLVESGGGVVQPGRSLRLSCAASGFTFSSYGMHWVRQAPGKGLEWVAVIWYDGSNKYYADSVKGRFTISRDNSKNTLYLQMNSLRAEDTAVYYCARDRDGFFLPMYYFDYWGQGTLVTVSS

SEQ ID NO: 498 - protein, 247 aa, synthetic construct
  REGION 1..247: note = C2 scFv
QSVVTQPPSVSAAPGQKVTISCSGSSSNIGNNYVSWYQQFPGTAPKLLIYDNNKRPSGIPDRFSGSKSGTSGTLGITGLQTGDEADYYCVTWDTSLSAGVFGGGTKLTVLGGGGSGGGGSGGGGSQITLKESGGGLVKPGGSLRLSCAASGFTFSNAWMSWVRQAPGKGLEWVGRIKSKTDGGTTDYAAPVKGRFTISRDDSKNTLYLQMNSLKTEDTAVYYCTTDPHGYYYGMDVWGQGTTVTVSS

SEQ ID NO: 499 - protein, 244 aa, synthetic construct
  REGION 1..244: note = C3 scFv
AIQMTQSPSSLSASVGDRVTITCRASQGIGTYLAWFQQKPGKAPKSLIYAASNLQSGVPSKFSGSGSGTDFTLTISNLQPEDFATYYCQQYKGYPLTFGGGTKLEIKGGGGSGGGGSGGGGSQVQLVQSGAEVKKPGSSVKVSCKASGGTFSSYAISWVRQAPGQGLEWMGGIIPIFGTANYAQKFQGRVTITADESTSTAYMELSSLRSEDTAVYYCARDSGWFGPRYYFDYWGQGTLVTVSS

SEQ ID NO: 500 - protein, 247 aa, synthetic construct
  REGION 1..247: note = C4 scFv
QSALTQPPSASGTPGQRVTISCSGSSSNIGSNYVNWYQQLPGTAPKLLIYRNNQRPSGVPDRFSGSKSGTSASLAISGLRSEDEADYYCAAWDDSLSGHGVFGTGTELTVLGGGGSGGGGSGGGGSQVQLVQSGPEVKKPGASVKVSCKASGYDFIRYYMNWVRQAPGQGPEWMGAIDPSDGDTTYGQKFQGRVTLTRDTFTSTVYMELSSLRSEDTAVYYCARDWELTNSYGLDVWGQGTTVTVSS

SEQ ID NO: 501 - protein, 247 aa, synthetic construct
  REGION 1..247: note = C5 scFv
NFMLTQPHSVSESPGKTVTLSCTRSSGSIAGSYVQWYQQRPGSSPTTVIFQDNQRPSGVPDRFSGSIDKSSNSASLTISGLKTEDEADYYCQSYDSNNQVFGGGTKLTVLGGGGSGGGGSGGGGSEVHLVESGGGVVRPGGSLRLSCAASGFTFGDYGMSWVRQAPGKGLEWVSGINWNGGRTGYADSVKGRFTISRDNAKNSLYLQMNSLRAEDTALYYCARARGSGSYFGYMDVWGKGTTVTVSS

SEQ ID NO: 502 - protein, 244 aa, synthetic construct
  REGION 1..244: note = C6 scFv
SYELTQPPSVSVSPGQTARIPCSGADLGDQYVSWYQHQPGQSPLLVIYEDDKRPSGIPERFSGSNSGNTATLTISGTQAMDEADYYCQAWDGNAAIFGGGTKLTVLGGGGSGGGGSGGGGSQVQLVQSGGGSVQPGGSLRLSCAASGFTFTRYSMNWVRQAPGKGLEWVSYISSSSSTIYYADSVKGRFTISRDNAKNSLYLQMNSLRDEDTAVYYCARDGYGGNSDYYGMDVWGQGTTVTVSS

SEQ ID NO: 503 - protein, 251 aa, synthetic construct
  REGION 1..251: note = C7 scFv
EIVLTQSPGTLSLSPGEKATLSCRASQSVSSSYLAWYQQKPGQAPRLLIYGASSRATGIPDRFSGSGSGTDFTLTISRLEPEDFAVYYCQQYGSSPLTFGGGTKLEIKGGGGSGGGGSGGGGSQVQLVQSGAEVKKPGASVKVSCKASGYTFTSYGISWVRQAPGQGLEWMGWISAYNGNTNYAQKLQGRVTMTTDTSTSTAYMELRSLRSDDTAVYYCARDPYDDYGGNSRDEEDAFDIWGQGTMVTVSS

SEQ ID NO: 504 - protein, 248 aa, synthetic construct
  REGION 1..248: note = C8 scFv
QSALTQPPSVSGSPGQSITISCTGTSTDIGGYDFVSWYQQHPGQAPKLIMFDVSSRPSGISNRFSGSKSGDTASLTISGLQGDDEADYYCSSYAGSGTWMFGGGTKLTVLGGGGSGGGGSGGGGSEVQLVESGGGLVKPGGSLRLSCAASGFTFSNAWMSWVRQAPGKGLEWVGRIKSKTDGGTTDSAAPVKGRFTISRDDSKNTLYLQMNSLKTEDTAVYYCTTYYFYSSGDMTDYWGQGTLVTVSS

SEQ ID NO: 505 - protein, 248 aa, synthetic construct
  REGION 1..248: note = C9 scFv
QSVLTQPPSASGTPGQRVTISCSGSNSNIENNYVYWYQHLPGTAPKRLIYQNNQRPSGVPDRFSGSKSGTSASLAISGLRSEDEADYYCSAWDDSLSAWVFGGGTELTVLGGGGSGGGGSGGGGSEVHLVESGGGLVQPGRSLRLSCTASGFTFGDYAMNWVRQAPGKGLEWVGFIRSKASGGTTDYAASVKGRFTISRDDSKSIAYLQMNSLKTEDTAVYYCTRALRGYSYGLFDYWGQGTLVTVSS

SEQ ID NO: 506 - protein, 247 aa, synthetic construct
  REGION 1..247: note = C10 scFv
SYELTQPPSVSVAPGKTARITCGGNNIGSKSVHWYQQKPGQAPVLVVYDDSDRPSGIPERFSGSNSGNTATLTISRVEAGDEADYYCQVWDSSSDHWVFGGGTKLTVLGGGGSGGGGSGGGGSQVQLVQSGAEVKKPGSSVKVSCKASGGTFSSYAISWVRQAPGQGLEWMGGIIPIFGTANYAQKFQGRVTITADESTSTAYMELSSLRSEDTAVYYCAREKWGYYGDYYYGMDVWGQGTTVTVSS

SEQ ID NO: 507 - protein, 251 aa, synthetic construct
  REGION 1..251: note = C11 scFv
QSVVTQPPSASGTPGQRVTISCSGSSSNIGSNYVYWYQQLPGTAPKLLIYRNNQRPSGVPDRFSGSKSGTSASLAISGLRSEDEADYYCAAWDDSLSGYVFGTGTKLTVLGGGGSGGGGSGGGGSEVQLVESGGGLVQPGRSLRLSCTASGFTFGDYAMSWVRQAPGKGLEWVGFIRSKAYGGTTEYAASVKGRFTISRDDSKSIAYLQMNSLKTEDTAVYYCTRDIGYYGSGSYSPFDYWGQGTLVTVSS

SEQ ID NO: 508 - protein, 246 aa, synthetic construct
  REGION 1..246: note = C12 scFv
QSVLTQPPSVSAAPGQKVTISCSGSSSNIGNNYVSWYQQLPGTAPKLLIFDDNKRPSGIPDRFSGSLSGTSASLAISGLQSEDDADYYCSAWDDSLSGYVFGTGTKLTVLGGGGSGGGGSGGGGSQVQLVQSGGGLVKPGGSLRLSCAASGFTFSSYNINWVRQAPGKGPEWVSSISSSSSYRYYADSVKGRFTISRDNAKNSLYLQMNSLRAEDTAVYYCVRDKTGGYGTAFDYWGQGTLVTVSS

SEQ ID NO: 509 - protein, 245 aa, synthetic construct
  REGION 1..245: note = C13 scFv
DVVMTQTPLSLPVTLGQPASISCRSSQGLVFSDGVTYLNWFQQRPGQSPRRLIYKVSNRDSGVPDRFSGSGSGTDFTLKISRVEAEDVGIYYCMQGTHWPHTFGQGTKLEIKGGGGSGGGGSGGGGSEVQLVESGGGLVKPGGSLRLSCAASGFTFSSYSMNWVRQAPGKGLEWVAFISHDASKKFYADSVKGRFTLSRDNSKNTLYLEMNSLGAEDTALYYCGRDRNWGFSDFWGQGTLVTVSS

SEQ ID NO: 510 - protein, 244 aa, synthetic construct
  REGION 1..244: note = C14 scFv
DIRMTQSPSSLSASVGDRVTITCQASQDITNYLNWYHQKPGKAPKLLIYDASNLETGVPSRFSGGGSGTDFTFTISSLQSEDIGTYYCQQYDDLPLTFGGGTKVEIKGGGGSGGGGSGGGGSQVQLQESGPGLVKPSETLSLTCTVSGGSISSSSHYWGWIRQPPGKGLEWIGSIYYSGSTYYNPSLKSRVTISVDTSKNQFSLKLSSVTAADTAVYYCARRVWVWPTYGMDVWGQGTTVTVSS

SEQ ID NO: 511 - protein, 237 aa, synthetic construct
  REGION 1..237: note = C15 scFv
DIQLTQSPSTLSASVGDRVTISCRASQSISSWLAWYQHKPGKAPKLLIYKTSALEDGVPSRFSGSGSGTEFTLTISSLQPDDFATYFCLHYGSYTFGQGTKVDIKGGGGSGGGGSGGGGSEVQLVESGGGLVNPGGSLRLSCEASGFTFSDYYISWIRQAPGKGLEWISYISGSSTYTDFADSVKGRFTISRDNAKNTVFLQMNSLRAEDTAVYYCARDRRGRFDPWGQGTLVTVSS

SEQ ID NO: 512 - protein, 249 aa, synthetic construct
  REGION 1..249: note = C16 scFv
QSVVTQPPSASGTPGQRVTISCSGSSSNIEGNTVSWYQQFPGAAPKLLIYSNSYRASGVPDRFSGSKSGTSASLAISELQSEDEADYYCSAWDDSLNGPVFGGGTELTVLGGGGSGGGGSGGGGSQVQLQESGGGLVQPGGSLRLSCAASGFTFSSYSMNWVRQAPGKGLEWVSYISSSSSTIYYADSVKGRFTISRDNAKNSLYLQMNSLRAEDTAVYYCARDIYGDWDYYYYGMDVWGQGTTVTVSS

SEQ ID NO: 513 - protein, 248 aa, synthetic construct
  REGION 1..248: note = C17 scFv
QSALTQPASVSGSLGQSITISCTGTSSDVGTYDYVSWYQQHPGKAPKLMIYDVTYRPSGVSHRFSGSKSGNTASLTISGLQADDEADYYCQQYNNWPPRYTFGQGTKVEIKGGGGSGGGGSGGGGSQVQLVQSGAEVEKPGASVKLSCTASGYNFNSYYMHWVRLTPGQGLEWMGLINPTNGRTTYAQKFQGRVTMTGDTSTRTVYLALSSLRSEDSALYYCARGSPPHIFDPDFDYWGQGTLVTVSS

SEQ ID NO: 514 - protein, 245 aa, synthetic construct
  REGION 1..245: note = C18 scFv
QSALTQPASVSGSPGQSITISCTGTSSDVGGYNYVSWYQQHPGKAPKLMIYDVSNRPSGVSNRFSGSKSGNTASLTISGLQAEDEADYYCSSYTSSSTLFVFGTGTELTVLGGGGSGGGGSGGGGSQVQLQESGPGLVKPSQTLSLTCTVSGGSISSGDYYWSWIRQSPGKGLEWIGYIHSTGTTYYNPSLKSRLTISLDTSKNQFSLKLNSVTAADTAVYYCARGGVGTIFNYWGQGTLVTVSS

SEQ ID NO: 515 - protein, 245 aa, synthetic construct
  REGION 1..245: note = C19 scFv
DIRMTQSPSSLSASVGDRVTITCRASQDIRHDLGWYQQKPGKAPSLLMYATSTLQSGVPSRFSGSGSGTHFTLTISSLKPEDSATYYCLQDGDYPLTFGGGTKLEIKGGGGSGGGGSGGGGSQVQLVQSGGGVVQPGRSLRLSCAASGFTFSSYGMHWVRQAPGKGLEWVAVISYDGSNKYYADSVKGRFTISRDNSKNTLYLQMNSLRAEDTAVYYCAKDPSLIQYYYYGMDVWGQGTMVTVSS

SEQ ID NO: 516 - protein, 248 aa, synthetic construct
  REGION 1..248: note = C20 scFv
QSALTQPPSASGSPGQSVTISCTGTSSDVGGYNYVSWYQQHPGKAPKLIIYEVSERPSGVPDRFSGSKSDNTASLTVSGLQAEDEADYYCSSYAGSNILVFGGGTKLTVLGGGGSGGGGSGGGGSEVQLVESGGGLVKPGGSLRLSCAASGFTFSNAWMSWVRQAPGKGLEWVGRIKSKTDGGTTDSAAPVKGRFTISRDDSKNTLYLQMNSLKTEDTAVYYCTTYYFYSSGDMTDYWGQGTLVTVSS

SEQ ID NO: 517 - protein, 250 aa, synthetic construct
  REGION 1..250: note = C21 scFv
QSVLTQPPSASGTPGQRVTISCSGSSSNVGGNPVYWYRQVPTAAPKLLVYGHNQRPPRDPDRFSGSKSGTSASLAISGLRSEDEADYYCAAWDDSLSGWVFGGGTELTVLGGGGSGGGGSGGGGSEVQLVESGGGLVQPGRSLRLSCAASGFTFDDYAMHWVRQAPGKGLEWVSGISWNSGSIGYADSVKGRFTISRDNAKNSLYLQMNSLRAEDTALYYCAKGRYVDIVATINDAFDIWGQGTMVTVSS

SEQ ID NO: 518 - protein, 242 aa, synthetic construct
  REGION 1..242: note = C22 scFv
SYELTQPPSVSVAPGKTARITCGANNIETKSVHWYRQRPGQAPILVIYYDSDRPSGIPERFSGSTSGDTATLTISRVEAEDEADYYCQVWDSTSDHVVFGEGTKLTVLGGGGSGGGGSGGGGSEVQLVESGAEVKKPGESLKISCKGSGYSFTSYWIGWVRQMPGKGLEWMGIINPSGGSTSYAQKFQGRVTMTRDTSTSTVYMELSSLRSEDTAVYYCARVVTPYYPLTNWGQGTLVTVSS

SEQ ID NO: 519 - protein, 247 aa, synthetic construct
  REGION 1..247: note = C23 scFv
DILMTQSPSSLSASVGDRVTITCQASQDISNYLNWYQQKPGKAPKLLIYDASNLETGVPSRFSGSGSGTGFSFTISSLQPEDFATYYCQQYGNLPLTFGGGTKLEIKGGGGSGGGGSGGGGSQVQLVQSGAEVKKPGASVKVSCKASGYTFTSYGISWVRQAPGQGLEWMGWISAYNGNTNYAQKLQGRVTMTTDTSTSTAYMELRSLRSDDTAVYYCARDRIAAAEVYYYYGMDVWGQGTTVTVSS

SEQ ID NO: 520 - protein, 247 aa, synthetic construct
  REGION 1..247: note = C24 scFv
DIQMTQSPSSLSASVGDRVTITCRASQSISSYLNWYQQKPGKAPKLLIHAASSLQSGVPSKFSGSGSGTDFTLTISSLQPEDFATYYCLQYKTYPYTFGPGTKVEIKGGGGSGGGGSGGGGSQVQLVQSGAEVKKPGSSVKVSCKASGGTFSSYAISWVRQAPGQGLEWMGGIIPIFGTANYAQKFQGRVTITADESTSTAYMELSSLRSEDTAVYYCARDSPSGSTNYYYYYMDVWGKGTTVTVSS

SEQ ID NO: 521 - protein, 248 aa, synthetic construct
  REGION 1..248: note = C25 scFv
QSALTQPASVSGPPGQSITISCTGTSSDVGGYNYVSWYQQHPGKAPKLMIYDVSNRPSGVSNRFSGSKSGNTASLTISGLQAEDEADYYCSSYTSSSTWVFGGGTKLTVLGGGGSGGGGSGGGGSEVHLVESGGGLVKPGGSLRLSCAASGFTFSNAWMSWVRQAPGKGLEWVGRIKSKTDGGTTDSAAPVKGRFTISRDDSKNTLYLQMNSLKTEDTAVYYCTTYYFYSSGDMTDYWGQGTLVTVSS

SEQ ID NO: 522 - protein, 249 aa, synthetic construct
  REGION 1..249: note = C26 scFv
QSVLTQPPSASGTPGQRVTISCSGSRSNIGSNTVSWYQQFPGTAPKLLIYLNNQRPSGVPDRFSGSKSGTSASLAISGLQSEDEAEYYCATWDDDLNGVFGGGTKLTVLGGGGSGGGGSGGGGSEVQLVESGGGLVQPGGSLRLSCAASGFTLSNFEMNWVRQAPGRGLEWVSYISATTSATSYADSVKGRFTISRDNAKNSLYLQMNSLRAEDTAVYYCARVRDGYNFGYYYYYMDVWGKGTTVTVSS

SEQ ID NO: 523 - protein, 251 aa, synthetic construct
  REGION 1..251: note = C27 scFv
EIVLTQSPGTVSLSPGERATLSCRASQRVSATYLAWYQQKPGQAPRLLMYGGSRRATGIPDRFSGSGSGTDFTLTIRRLEPEDSAVYYCQQYGSSPLTFGGGTKLEIKGGGGSGGGGSGGGGSQVQLVQSGSELKKPGASVKVSCKASGYTFTSYGISWVRQAPGQGLEWMGWISAYNGNTNYAQKLQGRVTMTTDTSTSTAYMELRSLRSDDTAVYYCARDPYDDYGGNSRDEEDAFDIWGQGTTVTVSS

SEQ ID NO: 524 - protein, 248 aa, synthetic construct
  REGION 1..248: note = C28 scFv
QSALTQPASVSGSPGQSITISCTGTSSDVGGYNYVSWYQQHPGKAPKLMIYDVSNRPSGVSNRFSGSKSGNTASLTISGLQAEDEADYYCSSYTSSSNWVFGGGTELTVLGGGGSGGGGSGGGGSEVHLVESGGGLVKPGGSLRLSCAASGFTFSNAWMSWVRQAPGKGLEWVGRIKSKTDGGTTDSAAPVKGRFTISRDDSKNTLYLQMNSLKTEDTAVYYCTTYYFYSSGDMTDYWGQGTLVTVSS

SEQ ID NO: 525 - protein, 251 aa, synthetic construct
  REGION 1..251: note = C29 scFv
QPVLTQPPSASGTPGQRVTISCSGSSSNIGSNYVYWYQQLPGTAPKLLIYRNNQRPSGVPDRFSGSKSGTSASLAISGLRSEDEADYYCAAWDDSLSGYVFGTGTKVTVLGGGGSGGGGSGGGGSEVHLVESGGGLVQPGRSLRLSCTASGFTFGDYAMSWVRQAPGKGLEWVGFIRSKAYGGTTEYAASVKGRFTISRDDSKSIAYLQMNSLKTEDTAVYYCTRDIGYYGSGSYSPFDYWGQGTLVTVSS

SEQ ID NO: 526 - protein, 248 aa, synthetic construct
  REGION 1..248: note = C30 scFv
AIRLTQSPSSLSASVGDRVTITCQASQNINNYLNWYQQKSGKAPKLLIYDASNLEAGVPSRFSGSASGTDFTFTISSLQPEDIATYYCQQNDNLPLTFGQGTRLEIKGGGGSGGGGSGGGGSEVQLVESGGGVVRPGGSLRLSCAASGFTFGDYGMSWVRQAPGKGLEWVSGINWNGGSTGYADSVKGRFTISRDNAKNSLYLQMNSLRAEDTALYYCARDRAPDYGDYLQVGTTDYWGQGTLVTVSS

SEQ ID NO: 527 - protein, 251 aa, synthetic construct
  REGION 1..251: note = C31 scFv
QPVLTQPPSMSGTPGQRVTISCSGGNSNIGDNSVSWYQQLPGTAPKLLIYNNNQRPLGVPDRFSGSKSGTSASLAIRGLQSEDEAHYYCSSWDDSLEGAQFGGGTKVTVLGGGGSGGGGSGGGGSEVQLVESGGGLVKPGGSLRLSCAASGFTFSDYYMSWIRQAPGKGLEWVSYISSSGSTIYYADSVKGRFTISRDNAKNSLYLQMNSLRAEDTAVYYCARGHQYYDFWSGYSNWFDPWGQGTLVTVSS

SEQ ID NO: 528 - protein, 250 aa, synthetic construct
  REGION 1..250: note = C32 scFv
QSVVTQPPSASGTPGQRVTISCSGSSSNIEGNTVSWYQQFPGAAPKLLIYSNSYRASGVPDRFSGSKSGTSASLAISELQSEDEADYYCSAWDDSLNGPVFGGGTKVTVLGGGGSGGGGSGGGGSEVQLVESGGGLVQPGGSLRLSCAASGFTFTSYAMNWVRQAPGKGLEWVSDISSSSSYIYYADSVKGRFTISRDNAKNSLYLQMNSLRAEDTAVYYCARDLYSGYDYGYYYGMDVWGQGTTVTVSS

SEQ ID NO: 529 - protein, 244 aa, synthetic construct
  REGION 1..244: note = C33 scFv
DIRLTQSPSSLSASVGDTITITCRASQDISSWIAWYQQKPGTAPRLLIYAASSLQSGVPSRFSGSGSGTDFTLTINSLHPEDFATYYCQQGSTFPLAFGGGTKVEIKGGGGSGGGGSGGGGSQVQLVQSGAEVKKPGSSVKVSCKASGGTFSSYAISWVRQAPGQGLEWMGGIIPIFGTANYAQKFQGRVTITADESTSTAYMELSSLRSEDTAVYYCARGLDNWNDVGWFDPWGQGTLVTVSS

SEQ ID NO: 530 - protein, 244 aa, synthetic construct
  REGION 1..244: note = C34 scFv
QSALTQPPSASGSPGQSVTISCTGTRSDVGAYNYVSWYQHHPGKAPKLMLYDVSKRPSGVSDRFSGSKSGNTASLTVSGLQSEDEANYYCSSYAGSGKYVFGSGTELTVLGGGGSGGGGSGGGGSEVHLVESGGGLVKPGGSLRLSCAASGFTFSDTWMSWVRQAPGKGLEWVGRIKSKTDGGTTNYAAPVKGRFTISRDDSKTTLFLQMNSLKTEDTAVYYCTGGDYPLFAYWGQGALVTVSS

SEQ ID NO: 531 - protein, 250 aa, synthetic construct
  REGION 1..250: note = C35 scFv
QSVVTQPPSVSAASGQKVTISCSGSSPNIGNNYVSWYQHLPGTAPKLLIYDNNKRPSGIPDRFSGSKSGTSVTLGITGLQTGDEADYYCGTWDSRLNIWVFGGGTKLTVLGGGGSGGGGSGGGGSEVHLVESGGGLVKPGGSLRLSCAASGFTFSNAWMSWVRQAPGKGLEWVGRIKSKTDGGTTDYAAPVKGRFTISRDDSKNTLYLQMNSLKTEDTAVYYCTTEAAGFYYYYYGMDVWGQGTTVTVSS

SEQ ID NO: 532 - protein, 14 aa, synthetic construct
  REGION 1..14: note = Her2 #7 LCDR1
TGTSSDVGGYDYVS

SEQ ID NO: 533 - protein, 7 aa, synthetic construct
  REGION 1..7: note = Her2 #7 LCDR2
DVSNRPS

SEQ ID NO: 534 - protein, 10 aa, synthetic construct
  REGION 1..10: note = Her2 #7 LCDR3
SSYAGSNNVV

SEQ ID NO: 535 - protein, 5 aa, synthetic construct
  REGION 1..5: note = Her2 #7 HCDR1
SYAIS

SEQ ID NO: 536 - protein, 17 aa, synthetic construct
  REGION 1..17: note = Her2 #7 HCDR2
GIIPIFGTANYAQKFQG

SEQ ID NO: 537 - protein, 13 aa, synthetic construct
  REGION 1..13: note = Her2 #7 HCDR3
GGVGAVRGHAFDI

SEQ ID NO: 538 - protein, 110 aa, synthetic construct
  REGION 1..110: note = Her2 #7 VL
QSALTQPASVSGSPGQSITISCTGTSSDVGGYDYVSWYQQHPGKAPKLMIYDVSNRPSGVSNRFSGSKSGNTASLTISGLQAEDEADYYCSSYAGSNNVVFGGGTKLTVL

SEQ ID NO: 539 - protein, 122 aa, synthetic construct
  REGION 1..122: note = Her2 #7 VH
QVQLVQSGAEVKKPGSSVKVSCKASGGTFSSYAISWVRQAPGQGLEWMGGIIPIFGTANYAQKFQGRVTITADESTSTAYMELSSLRSEDTAVYYCARGGVGAVRGHAFDIWGQGTMVTVSS

SEQ ID NO: 540 - protein, 247 aa, synthetic construct
  REGION 1..247: note = Her2 #7 anti-HER2 scFv
QSALTQPASVSGSPGQSITISCTGTSSDVGGYDYVSWYQQHPGKAPKLMIYDVSNRPSGVSNRFSGSKSGNTASLTISGLQAEDEADYYCSSYAGSNNVVFGGGTKLTVLGGGGSGGGGSGGGGSQVQLVQSGAEVKKPGSSVKVSCKASGGTFSSYAISWVRQAPGQGLEWMGGIIPIFGTANYAQKFQGRVTITADESTSTAYMELSSLRSEDTAVYYCARGGVGAVRGHAFDIWGQGTMVTVSS

SEQ ID NO: 541 - protein, 470 aa, synthetic construct
  REGION 1..470: note = Her2 #7 anti-HER2 CAR
QSALTQPASVSGSPGQSITISCTGTSSDVGGYDYVSWYQQHPGKAPKLMIYDVSNRPSGVSNRFSGSKSGNTASLTISGLQAEDEADYYCSSYAGSNNVVFGGGTKLTVLGGGGSGGGGSGGGGSQVQLVQSGAEVKKPGSSVKVSCKASGGTFSSYAISWVRQAPGQGLEWMGGIIPIFGTANYAQKFQGRVTITADESTSTAYMELSSLRSEDTAVYYCARGGVGAVRGHAFDIWGQGTMVTVSSTTTPAPRPPTPAPTIASQPLSLRPEACRPAAGGAVHTRGLDFACDIYIWAPLAGTCGVLLLSLVITLYCKRGRKKLLYIFKQPFMRPVQTTQEEDGCSCRFPEEEEGGCELRVKFSRSADAPAYKQGQNQLYNELNLGRREEYDVLDKRRGRDPEMGGKPRRKNPQEGLYNELQKDKMAEAYSEIGMKGERRRGKGHDGLYQGLSTATKDTYDALHMQALPPR

SEQ ID NO: 542 - protein, 7 aa, synthetic construct
  REGION 1..7: note = CD19 N79 LCDR1
GTSYYWG

SEQ ID NO: 543 - protein, 16 aa, synthetic construct
  REGION 1..16: note = CD19 N79 LCDR2
SIYYSGTTYYDPSLKS

SEQ ID NO: 544 - protein, 15 aa, synthetic construct
  REGION 1..15: note = CD19 N79 LCDR3
IVGMTTATPFRSMDV

SEQ ID NO: 545 - protein, 11 aa, synthetic construct
  REGION 1..11: note = CD19 N79 HCDR1
RASQSISSYLN

SEQ ID NO: 546 - protein, 7 aa, synthetic construct
  REGION 1..7: note = CD19 N79 HCDR2
AASSLQS

SEQ ID NO: 547 - protein, 9 aa, synthetic construct
  REGION 1..9: note = CD19 N79 HCDR3
QQSYSTPLT

SEQ ID NO: 548 - protein, 125 aa, synthetic construct
  REGION 1..125: note = CD19 N79 VH
EVQLVESGPGMVKASETLSLTCAVSGDSISGTSYYWGWIRQPPGKGLEWIGSIYYSGTTYYDPSLKSRVAISVDTSKNQFSLKVTSVTAADTAVYYCVRIVGMTTATPFRSMDVWGQGTTVTVSS

SEQ ID NO: 549 - protein, 107 aa, synthetic construct
  REGION 1..107: note = CD19 N79 VL
AIQLTQSPSSLSASVGDRVTITCRASQSISSYLNWYQQKPGKAPKLLIYAASSLQSGVPSRFSGSGSGTDFTLTISSLQPEDFATYYCQQSYSTPLTFGGGTKVEIK

SEQ ID NO: 550 - protein, 247 aa, synthetic construct
  REGION 1..247: note = CD19 N79 scFv
AIQLTQSPSSLSASVGDRVTITCRASQSISSYLNWYQQKPGKAPKLLIYAASSLQSGVPSRFSGSGSGTDFTLTISSLQPEDFATYYCQQSYSTPLTFGGGTKVEIKGGGGSGGGGSGGGGSEVQLVESGPGMVKASETLSLTCAVSGDSISGTSYYWGWIRQPPGKGLEWIGSIYYSGTTYYDPSLKSRVAISVDTSKNQFSLKVTSVTAADTAVYYCVRIVGMTTATPFRSMDVWGQGTTVTVSS

SEQ ID NO: 551 - protein, 491 aa, synthetic construct
  REGION 1..491: note = CD19 N79 CAR
MALPVTALLLPLALLLHAARPAIQLTQSPSSLSASVGDRVTITCRASQSISSYLNWYQQKPGKAPKLLIYAASSLQSGVPSRFSGSGSGTDFTLTISSLQPEDFATYYCQQSYSTPLTFGGGTKVEIKGGGGSGGGGSGGGGSEVQLVESGPGMVKASETLSLTCAVSGDSISGTSYYWGWIRQPPGKGLEWIGSIYYSGTTYYDPSLKSRVAISVDTSKNQFSLKVTSVTAADTAVYYCVRIVGMTTATPFRSMDVWGQGTTVTVSSTTTPAPRPPTPAPTIASQPLSLRPEACRPAAGGAVHTRGLDFACDIYIWAPLAGTCGVLLLSLVITLYCKRGRKKLLYIFKQPFMRPVQTTQEEDGCSCRFPEEEEGGCELRVKFSRSADAPAYKQGQNQLYNELNLGRREEYDVLDKRRGRDPEMGGKPRRKNPQEGLYNELQKDKMAEAYSEIGMKGERRRGKGHDGLYQGLSTATKDTYDALHMQALPPR

SEQ ID NO: 552 - protein, 11 aa, synthetic construct
  REGION 1..11: note = IL13Ra2 #5 LCDR1
RASQDIRSYLA

SEQ ID NO: 553 - protein, 7 aa, synthetic construct
  REGION 1..7: note = IL13Ra2 #5 LCDR2
AASTLQS

SEQ ID NO: 554 - protein, 9 aa, synthetic construct
  REGION 1..9: note = IL13Ra2 #5 LCDR3
QQLNSFPAT

SEQ ID NO: 555 - protein, 5 aa, synthetic construct
  REGION 1..5: note = IL13Ra2 #5 HCDR1
SYSMN

SEQ ID NO: 556 - protein, 17 aa, synthetic construct
  REGION 1..17: note = IL13Ra2 #5 HCDR2
SISSSSSYIYYADSVKG

SEQ ID NO: 557 - protein, 10 aa, synthetic construct
  REGION 1..10: note = IL13Ra2 #5 HCDR3
AGGSLGAFDY

SEQ ID NO: 558 - protein, 107 aa, synthetic construct
  REGION 1..107: note = IL13Ra2 #5 VL
DILLTQSPSFLSASVGDRVTITCRASQDIRSYLAWYQQKPGKAPKLLIYAASTLQSGVPSRFSGSGSGTEFTLTISSLQPEDFATYYCQQLNSFPATFGQGTRLEIK

SEQ ID NO: 559 - protein, 119 aa, synthetic construct
  REGION 1..119: note = IL13Ra2 #5 VH
EVQLVESGGGLVKPGGSLRLSCAASGFTFSSYSMNWVRQAPGKGLEWVSSISSSSSYIYYADSVKGRFTISRDNAKNSLYLQMNSLRAEDTAVYYCARAGGSLGAFDYWGQGTLVTVSS

SEQ ID NO: 560 - protein, 241 aa, synthetic construct
  REGION 1..241: note = IL13Ra2 #5 scFv
DILLTQSPSFLSASVGDRVTITCRASQDIRSYLAWYQQKPGKAPKLLIYAASTLQSGVPSRFSGSGSGTEFTLTISSLQPEDFATYYCQQLNSFPATFGQGTRLEIKGGGGSGGGGSGGGGSEVQLVESGGGLVKPGGSLRLSCAASGFTFSSYSMNWVRQAPGKGLEWVSSISSSSSYIYYADSVKGRFTISRDNAKNSLYLQMNSLRAEDTAVYYCARAGGSLGAFDYWGQGTLVTVSS

SEQ ID NO: 561 - protein, 485 aa, synthetic construct
  REGION 1..485: note = IL13Ra2 #5 CAR
MALPVTALLLPLALLLHAARPDILLTQSPSFLSASVGDRVTITCRASQDIRSYLAWYQQKPGKAPKLLIYAASTLQSGVPSRFSGSGSGTEFTLTISSLQPEDFATYYCQQLNSFPATFGQGTRLEIKGGGGSGGGGSGGGGSEVQLVESGGGLVKPGGSLRLSCAASGFTFSSYSMNWVRQAPGKGLEWVSSISSSSSYIYYADSVKGRFTISRDNAKNSLYLQMNSLRAEDTAVYYCARAGGSLGAFDYWGQGTLVTVSSTTTPAPRPPTPAPTIASQPLSLRPEACRPAAGGAVHTRGLDFACDIYIWAPLAGTCGVLLLSLVITLYCKRGRKKLLYIFKQPFMRPVQTTQEEDGCSCRFPEEEEGGCELRVKFSRSADAPAYKQGQNQLYNELNLGRREEYDVLDKRRGRDPEMGGKPRRKNPQEGLYNELQKDKMAEAYSEIGMKGERRRGKGHDGLYQGLSTATKDTYDALHMQALPPR

SEQ ID NO: 562 - protein, 11 aa, synthetic construct
  REGION 1..11: note = B7H3 574 LCDR1
RASQGISSALA

SEQ ID NO: 563 - protein, 7 aa, synthetic construct
  REGION 1..7: note = B7H3 574 LCDR2
DASTLES

SEQ ID NO: 564 - protein, 9 aa, synthetic construct
  REGION 1..9: note = B7H3 574 LCDR3
QQFNSFPLT

SEQ ID NO: 565 - protein, 5 aa, synthetic construct
  REGION 1..5: note = B7H3 574 HCDR1
DYYMS

SEQ ID NO: 566 - protein, 16 aa, synthetic construct
  REGION 1..16: note = B7H3 574 HCDR2
YISSGSNIYYADSVKG

SEQ ID NO: 567 - protein, 14 aa, synthetic construct
  REGION 1..14: note = B7H3 574HCDR3
RRSSSGWYYYGMDV

SEQ ID NO: 568 - protein, 107 aa, synthetic construct
  REGION 1..107: note = B7H3 574 VL
AIRLTQSPSSLSASVGDRVTITCRASQGISSALAWYQQKPGKPPNLLIYDASTLESGVPSRFSGSGSGTDFTLTISSLQPEDFATYYCQQFNSFPLTFGGGTKLEIK

SEQ ID NO: 569 - protein, 122 aa, synthetic construct
  REGION 1..122: note = B7H3 574 VH
EVQLVESGGGLVKPGGSLRLSCAASGITFSDYYMSWIRQAPGKGLEWVSYISSGSNIYYADSVKGRFTISRDNAKNSLYLQMNSLRAEDTAVYYCARRRSSSGWYYYGMDVWGQGTTVTVSS

SEQ ID NO: 570 - protein, 244 aa, synthetic construct
  REGION 1..244: note = B7H3 574 scFv
AIRLTQSPSSLSASVGDRVTITCRASQGISSALAWYQQKPGKPPNLLIYDASTLESGVPSRFSGSGSGTDFTLTISSLQPEDFATYYCQQFNSFPLTFGGGTKLEIKGGGGSGGGGSGGGGSEVQLVESGGGLVKPGGSLRLSCAASGITFSDYYMSWIRQAPGKGLEWVSYISSGSNIYYADSVKGRFTISRDNAKNSLYLQMNSLRAEDTAVYYCARRRSSSGWYYYGMDVWGQGTTVTVSS

SEQ ID NO: 571 - protein, 488 aa, synthetic construct
  REGION 1..488: note = B7H3 574 CAR
MALPVTALLLPLALLLHAARPAIRLTQSPSSLSASVGDRVTITCRASQGISSALAWYQQKPGKPPNLLIYDASTLESGVPSRFSGSGSGTDFTLTISSLQPEDFATYYCQQFNSFPLTFGGGTKLEIKGGGGSGGGGSGGGGSEVQLVESGGGLVKPGGSLRLSCAASGITFSDYYMSWIRQAPGKGLEWVSYISSGSNIYYADSVKGRFTISRDNAKNSLYLQMNSLRAEDTAVYYCARRRSSSGWYYYGMDVWGQGTTVTVSSTTTPAPRPPTPAPTIASQPLSLRPEACRPAAGGAVHTRGLDFACDIYIWAPLAGTCGVLLLSLVITLYCKRGRKKLLYIFKQPFMRPVQTTQEEDGCSCRFPEEEEGGCELRVKFSRSADAPAYKQGQNQLYNELNLGRREEYDVLDKRRGRDPEMGGKPRRKNPQEGLYNELQKDKMAEAYSEIGMKGERRRGKGHDGLYQGLSTATKDTYDALHMQALPPR

SEQ ID NO: 572 - protein, 485 aa, synthetic construct; identical to SEQ ID NO: 135
  REGION 1..485: note = Anti-MSLN M12.BBZ CAR amino acid sequence

SEQ ID NO: 573 - DNA, 1458 bp, synthetic construct
  misc_feature 1..1458: note = Anti-MSLN M12.BBZ CAR nucleotide sequence
  source 1..1458: mol_type = other DNA
atggccttaccagtgaccgccttgctcctgccgctggccttgctgctccacgccgccaggccggccatccggttgacccagtctccatccctcctgtctgcatctgtaggagacagggtcaccgtcacttgtcgggccagtcagggcggtggcaattatttagcctggtatcagcaaaaaccagggaaagccccgaaactcctgatctatggtgcatccaagttgcaaagtggggtcccatcgaggttcagcggcagtggatctgggacagaattcactctcacaatcagcagtctgcagcctgaagattttgcaacttattactgtcaacagcttaatagttaccctgtcacttttggccaggggaccaaagtggatatcaaaggtggtggtggttctggcggcggcggctccggaggtggtggatccgaggtgcagctggtggagtctggggctgaggtgaagaagcctggggcctcagtgaaggtttcctgcaaggcatctggatacaccttcaccacctactatatacactgggtgcgacaggcccctggacaagggcttgagtggatgggaataatcaaccctagtagtggtagcactacctacacacagaagttccagggcagagtcaccatgaccagggacacgtccacgagcacagtctacattgaactgagcggcctgagatctgaagacacggccgtgtattactgtgcccgaggggagacgcttcggggctactttgactactggggccagggaaccctggtcaccgtctcttcaaccacgacgccagcgccgcgaccaccaacaccggcgcccaccatcgcgtcgcagcccctgtccctgcgcccagaggcgtgccggccagcggcggggggcgcagtgcacacgagggggctggacttcgcctgtgatatctacatctgggcgcccttggccgggacttgtggggtccttctcctgtcactggttatcaccctttactgcaaacggggcagaaagaaactcctgtatatattcaaacaaccatttatgagaccagtacaaactactcaagaggaagatggctgtagctgccgatttccagaagaagaagaaggaggatgtgaactgagagtgaagttcagcaggagcgcagacgcccccgcgtacaagcagggccagaaccagctctataacgagctcaatctaggacgaagagaggagtacgacgttttggacaagagacgtggccgggaccctgagatggggggaaagccgagaaggaagaaccctcaggaaggcctgtacaatgaactgcagaaagataagatggcggaggcctacagtgagattgggatgaaaggcgagcgccggaggggcaaggggcacgatggcctttaccagggtctcagtacagccaccaaggacacctacgacgcccttcacatgcaggccctgccccctcgctaa

SEQ ID NO: 574 - protein, 107 aa, synthetic construct; identical to SEQ ID NO: 90
  REGION 1..107: note = M12 VL amino acid sequence

SEQ ID NO: 575 - protein, 119 aa, synthetic construct; identical to SEQ ID NO: 105
  REGION 1..119: note = M12 VH amino acid sequence

SEQ ID NO: 576 - protein, 11 aa, synthetic construct
  REGION 1..11: note = M12 LCDR1
RASQGGGNYLA

SEQ ID NO: 577 - protein, 7 aa, synthetic construct
  REGION 1..7: note = M12 LCDR2
GASKLQS

SEQ ID NO: 578 - protein, 9 aa, synthetic construct
  REGION 1..9: note = M12 LCDR3
QQLNSYPVT

SEQ ID NO: 579 - protein, 5 aa, synthetic construct
  REGION 1..5: note = M12 HCDR1
TYYIH

SEQ ID NO: 580 - protein, 17 aa, synthetic construct
  REGION 1..17: note = M12 HCDR2
IINPSSGSTTYTQKFQG

SEQ ID NO: 581 - protein, 10 aa, synthetic construct
  REGION 1..10: note = M12 HCDR3
GETLRGYFDY

SEQ ID NO: 582 - DNA, 1923 bp, synthetic construct
  misc_feature 1..1923: note = DNA template for M12.BBZ linear mRNA
  source 1..1923: mol_type = other DNA
taatacgactcactataggatggccttaccagtgaccgccttgctcctgccgctggccttgctgctccacgccgccaggccggccatccggttgacccagtctccatccctcctgtctgcatctgtaggagacagggtcaccgtcacttgtcgggccagtcagggcggtggcaattatttagcctggtatcagcaaaaaccagggaaagccccgaaactcctgatctatggtgcatccaagttgcaaagtggggtcccatcgaggttcagcggcagtggatctgggacagaattcactctcacaatcagcagtctgcagcctgaagattttgcaacttattactgtcaacagcttaatagttaccctgtcacttttggccaggggaccaaagtggatatcaaaggtggtggtggttctggcggcggcggctccggaggtggtggatccgaggtgcagctggtggagtctggggctgaggtgaagaagcctggggcctcagtgaaggtttcctgcaaggcatctggatacaccttcaccacctactatatacactgggtgcgacaggcccctggacaagggcttgagtggatgggaataatcaaccctagtagtggtagcactacctacacacagaagttccagggcagagtcaccatgaccagggacacgtccacgagcacagtctacattgaactgagcggcctgagatctgaagacacggccgtgtattactgtgcccgaggggagacgcttcggggctactttgactactggggccagggaaccctggtcaccgtctcttcaaccacgacgccagcgccgcgaccaccaacaccggcgcccaccatcgcgtcgcagcccctgtccctgcgcccagaggcgtgccggccagcggcggggggcgcagtgcacacgagggggctggacttcgcctgtgatatctacatctgggcgcccttggccgggacttgtggggtccttctcctgtcactggttatcaccctttactgcaaacggggcagaaagaaactcctgtatatattcaaacaaccatttatgagaccagtacaaactactcaagaggaagatggctgtagctgccgatttccagaagaagaagaaggaggatgtgaactgagagtgaagttcagcaggagcgcagacgcccccgcgtacaagcagggccagaaccagctctataacgagctcaatctaggacgaagagaggagtacgacgttttggacaagagacgtggccgggaccctgagatggggggaaagccgagaaggaagaaccctcaggaaggcctgtacaatgaactgcagaaagataagatggcggaggcctacagtgagattgggatgaaaggcgagcgccggaggggcaaggggcacgatggcctttaccagggtctcagtacagccaccaaggacacctacgacgcccttcacatgcaggccctgccccctcgctaagtcgacagctcgctttcttgctgtccaatttctattaaaggttcctttgttccctaagtccaactactaaactgggggatattatgaagggccttgagcatctggattctgcctaataaaaaacatttattttcattgctgcgtcgagagctcgctttcttgctgtccaatttctattaaaggttcctttgttccctaagtccaactactaaactgggggatattatgaagggccttgagcatctggattctgcctaataaaaaacatttattttcattgctgcctcgacgaattcaaaaaaaaaaaaaaaaaaaaaaaaaaaaaaaaaaaaaaaaaaaaaaaaaaaaaaaaaaaaaaaaaaaaaaaaaaaaaaaaaaaaaaaaaaaaaaaaaaaaaaaaaaaaaaaaaaaaaaaaaaaaaaaaaaaaaaaaaaaaaaaaaaaaaa

SEQ ID NO: 583 - DNA, 2726 bp, synthetic construct
  misc_feature 1..2726: note = DNA template for M12.BBZ circRNA
  source 1..2726: mol_type = other DNA
taatacgactcactataggggagaccctcgaccgtcgattgtccactggtcaacaatagatgacttacaactaatcggaaggtgcagagactcgacgggagctaccctaacgtcaagacgagggtaaagagagagtccaattctcaaagccaataggcagtagcgaaagctgcaagagaatgaaaatccgttgaccttaaacggtcgtgtgggttcaagtccctccacccccacgccggaaacgcaatagccgaaaaacaaaaaacaaaaaaaacaaaaaaaaaaccaaaaaaacaaaacacattaaaacagcctgtgggttgatcccacccacaggcccattgggcgctagcactctggtatcacggtacctttgtgcgcctgttttataccccctcccccaactgtaacttagaagtaacacacaccgatcaacagtcagcgtggcacaccagccacgttttgatcaagcacttctgttaccccggactgagtatcaatagactgctcacgcggttgaaggagaaagcgttcgttatccggccaactacttcgaaaaacctagtaacaccgtggaagttgcagagtgtttcgctcagcactaccccagtgtagatcaggtcgatgagtcaccgcattccccacgggcgaccgtggcggtggctgcgttggcggcctgcccatggggaaacccatgggacgctctaatacagacatggtgcgaagagtctattgagctagttggtagtcctccggcccctgaatgcggctaatcctaactgcggagcacacaccctcaagccagagggcagtgtgtcgtaacgggcaactctgcagcggaaccgactactttgggtgtccgtgtttcattttattcctatactggctgcttatggtgacaattgagagatcgttaccatatagctattggattggccatccggtgactaatagagctattatatatccctttgttgggtttataccacttagcttgaaagaggttaaaacattacaattcattgttaagttgaatacagcaaatctagagccaccatggccttaccagtgaccgccttgctcctgccgctggccttgctgctccacgccgccaggccggccatccggttgacccagtctccatccctcctgtctgcatctgtaggagacagggtcaccgtcacttgtcgggccagtcagggcggtggcaattatttagcctggtatcagcaaaaaccagggaaagccccgaaactcctgatctatggtgcatccaagttgcaaagtggggtcccatcgaggttcagcggcagtggatctgggacagaattcactctcacaatcagcagtctgcagcctgaagattttgcaacttattactgtcaacagcttaatagttaccctgtcacttttggccaggggaccaaagtggatatcaaaggtggtggtggttctggcggcggcggctccggaggtggtggatccgaggtgcagctggtggagtctggggctgaggtgaagaagcctggggcctcagtgaaggtttcctgcaaggcatctggatacaccttcaccacctactatatacactgggtgcgacaggcccctggacaagggcttgagtggatgggaataatcaaccctagtagtggtagcactacctacacacagaagttccagggcagagtcaccatgaccagggacacgtccacgagcacagtctacattgaactgagcggcctgagatctgaagacacggccgtgtattactgtgcccgaggggagacgcttcggggctactttgactactggggccagggaaccctggtcaccgtctcttcaaccacgacgccagcgccgcgaccaccaacaccggcgcccaccatcgcgtcgcagcccctgtccctgcgcccagaggcgtgccggccagcggcggggggcgcagtgcacacgagggggctggacttcgcctgtgatatctacatctgggcgcccttggccgggacttgtggggtccttctcctgtcactggttatcaccctttactgcaaacggggcagaaagaaactcctgtatatattcaaacaaccatttatgagaccagtacaaactactcaagaggaagatggctgtagctgccgatttccagaagaagaagaaggaggatgtgaactgagagtgaagttcagcaggagcgcagacgcccccgcgtacaagcagggccagaaccagctctataacgagctcaatctaggacgaagagaggagtacgacgttttggacaagagacgtggccgggaccctgagatggggggaaagccgagaaggaagaaccctcaggaaggcctgtacaatgaactgcagaaagataagatggcggaggcctacagtgagattgggatgaaaggcgagcgccggaggggcaaggggcacgatggcctttaccagggtctcagtacagccaccaaggacacctacgacgcccttcacatgcaggccctgccccctcgctaagtcgacaaaaaacaaaaaacaaaacggctattatgcgttaccggcgagacgctacggacttaaataattgagccttaaagaagaaattctttaagtggatgctctcaaactcagggaaacctaaatctagttatagacaaggcaatcctgagccaagccgaagtagtaattagtaagaccagtggacaatcgacggataacagcatatctag

SEQ ID NO: 584 - DNA, 2765 bp, synthetic construct
  misc_feature 1..2765: note = DNA template for M12.BBZ-45A circRNA
  source 1..2765: mol_type = other DNA
taatacgactcactataggggagaccctcgaccgtcgattgtccactggtcaacaatagatgacttacaactaatcggaaggtgcagagactcgacgggagctaccctaacgtcaagacgagggtaaagagagagtccaattctcaaagccaataggcagtagcgaaagctgcaagagaatgaaaatccgttgaccttaaacggtcgtgtgggttcaagtccctccacccccacgccggaaacgcaatagccgaaaaacaaaaaacaaaaaaaacaaaaaaaaaaccaaaaaaacaaaacacattaaaacagcctgtgggttgatcccacccacaggcccattgggcgctagcactctggtatcacggtacctttgtgcgcctgttttataccccctcccccaactgtaacttagaagtaacacacaccgatcaacagtcagcgtggcacaccagccacgttttgatcaagcacttctgttaccccggactgagtatcaatagactgctcacgcggttgaaggagaaagcgttcgttatccggccaactacttcgaaaaacctagtaacaccgtggaagttgcagagtgtttcgctcagcactaccccagtgtagatcaggtcgatgagtcaccgcattccccacgggcgaccgtggcggtggctgcgttggcggcctgcccatggggaaacccatgggacgctctaatacagacatggtgcgaagagtctattgagctagttggtagtcctccggcccctgaatgcggctaatcctaactgcggagcacacaccctcaagccagagggcagtgtgtcgtaacgggcaactctgcagcggaaccgactactttgggtgtccgtgtttcattttattcctatactggctgcttatggtgacaattgagagatcgttaccatatagctattggattggccatccggtgactaatagagctattatatatccctttgttgggtttataccacttagcttgaaagaggttaaaacattacaattcattgttaagttgaatacagcaaatctagagccaccatggccttaccagtgaccgccttgctcctgccgctggccttgctgctccacgccgccaggccggccatccggttgacccagtctccatccctcctgtctgcatctgtaggagacagggtcaccgtcacttgtcgggccagtcagggcggtggcaattatttagcctggtatcagcaaaaaccagggaaagccccgaaactcctgatctatggtgcatccaagttgcaaagtggggtcccatcgaggttcagcggcagtggatctgggacagaattcactctcacaatcagcagtctgcagcctgaagattttgcaacttattactgtcaacagcttaatagttaccctgtcacttttggccaggggaccaaagtggatatcaaaggtggtggtggttctggcggcggcggctccggaggtggtggatccgaggtgcagctggtggagtctggggctgaggtgaagaagcctggggcctcagtgaaggtttcctgcaaggcatctggatacaccttcaccacctactatatacactgggtgcgacaggcccctggacaagggcttgagtggatgggaataatcaaccctagtagtggtagcactacctacacacagaagttccagggcagagtcaccatgaccagggacacgtccacgagcacagtctacattgaactgagcggcctgagatctgaagacacggccgtgtattactgtgcccgaggggagacgcttcggggctactttgactactggggccagggaaccctggtcaccgtctcttcaaccacgacgccagcgccgcgaccaccaacaccggcgcccaccatcgcgtcgcagcccctgtccctgcgcccagaggcgtgccggccagcggcggggggcgcagtgcacacgagggggctggacttcgcctgtgatatctacatctgggcgcccttggccgggacttgtggggtccttctcctgtcactggttatcaccctttactgcaaacggggcagaaagaaactcctgtatatattcaaacaaccatttatgagaccagtacaaactactcaagaggaagatggctgtagctgccgatttccagaagaagaagaaggaggatgtgaactgagagtgaagttcagcaggagcgcagacgcccccgcgtacaagcagggccagaaccagctctataacgagctcaatctaggacgaagagaggagtacgacgttttggacaagagacgtggccgggaccctgagatggggggaaagccgagaaggaagaaccctcaggaaggcctgtacaatgaactgcagaaagataagatggcggaggcctacagtgagattgggatgaaaggcgagcgccggaggggcaaggggcacgatggcctttaccagggtctcagtacagccaccaaggacacctacgacgcccttcacatgcaggccctgccccctcgctaagtcgacaaaaaaaaaaaaaaaaaaaaaaaaaaaaaaaaaaaaaaaaaaaaacaaaaaacaaaacggctattatgcgttaccggcgagacgctacggacttaaataattgagccttaaagaagaaattctttaagtggatgctctcaaactcagggaaacctaaatctagttatagacaaggcaatcctgagccaagccgaagtagtaattagtaagaccagtggacaatcgacggataacagcatatctag

SEQ ID NO: 585 - DNA, 2790 bp, synthetic construct
  misc_feature 1..2790: note = DNA template for M12.BBZ-70A circRNA
  source 1..2790: mol_type = other DNA
taatacgactcactataggggagaccctcgaccgtcgattgtccactggtcaacaatagatgacttacaactaatcggaaggtgcagagactcgacgggagctaccctaacgtcaagacgagggtaaagagagagtccaattctcaaagccaataggcagtagcgaaagctgcaagagaatgaaaatccgttgaccttaaacggtcgtgtgggttcaagtccctccacccccacgccggaaacgcaatagccgaaaaacaaaaaacaaaaaaaacaaaaaaaaaaccaaaaaaacaaaacacattaaaacagcctgtgggttgatcccacccacaggcccattgggcgctagcactctggtatcacggtacctttgtgcgcctgttttataccccctcccccaactgtaacttagaagtaacacacaccgatcaacagtcagcgtggcacaccagccacgttttgatcaagcacttctgttaccccggactgagtatcaatagactgctcacgcggttgaaggagaaagcgttcgttatccggccaactacttcgaaaaacctagtaacaccgtggaagttgcagagtgtttcgctcagcactaccccagtgtagatcaggtcgatgagtcaccgcattccccacgggcgaccgtggcggtggctgcgttggcggcctgcccatggggaaacccatgggacgctctaatacagacatggtgcgaagagtctattgagctagttggtagtcctccggcccctgaatgcggctaatcctaactgcggagcacacaccctcaagccagagggcagtgtgtcgtaacgggcaactctgcagcggaaccgactactttgggtgtccgtgtttcattttattcctatactggctgcttatggtgacaattgagagatcgttaccatatagctattggattggccatccggtgactaatagagctattatatatccctttgttgggtttataccacttagcttgaaagaggttaaaacattacaattcattgttaagttgaatacagcaaatctagagccaccatggccttaccagtgaccgccttgctcctgccgctggccttgctgctccacgccgccaggccggccatccggttgacccagtctccatccctcctgtctgcatctgtaggagacagggtcaccgtcacttgtcgggccagtcagggcggtggcaattatttagcctggtatcagcaaaaaccagggaaagccccgaaactcctgatctatggtgcatccaagttgcaaagtggggtcccatcgaggttcagcggcagtggatctgggacagaattcactctcacaatcagcagtctgcagcctgaagattttgcaacttattactgtcaacagcttaatagttaccctgtcacttttggccaggggaccaaagtggatatcaaaggtggtggtggttctggcggcggcggctccggaggtggtggatccgaggtgcagctggtggagtctggggctgaggtgaagaagcctggggcctcagtgaaggtttcctgcaaggcatctggatacaccttcaccacctactatatacactgggtgcgacaggcccctggacaagggcttgagtggatgggaataatcaaccctagtagtggtagcactacctacacacagaagttccagggcagagtcaccatgaccagggacacgtccacgagcacagtctacattgaactgagcggcctgagatctgaagacacggccgtgtattactgtgcccgaggggagacgcttcggggctactttgactactggggccagggaaccctggtcaccgtctcttcaaccacgacgccagcgccgcgaccaccaacaccggcgcccaccatcgcgtcgcagcccctgtccctgcgcccagaggcgtgccggccagcggcggggggcgcagtgcacacgagggggctggacttcgcctgtgatatctacatctgggcgcccttggccgggacttgtggggtccttctcctgtcactggttatcaccctttactgcaaacggggcagaaagaaactcctgtatatattcaaacaaccatttatgagaccagtacaaactactcaagaggaagatggctgtagctgccgatttccagaagaagaagaaggaggatgtgaactgagagtgaagttcagcaggagcgcagacgcccccgcgtacaagcagggccagaaccagctctataacgagctcaatctaggacgaagagaggagtacgacgttttggacaagagacgtggccgggaccctgagatggggggaaagccgagaaggaagaaccctcaggaaggcctgtacaatgaactgcagaaagataagatggcggaggcctacagtgagattgggatgaaaggcgagcgccggaggggcaaggggcacgatggcctttaccagggtctcagtacagccaccaaggacacctacgacgcccttcacatgcaggccctgccccctcgctaagtcgacaaaaaaaaaaaaaaaaaaaaaaaaaaaaaaaaaaaaaaaaaaaaaaaaaaaaaaaaaaaaaaaaaaaaaacaaaaaacaaaacggctattatgcgttaccggcgagacgctacggacttaaataattgagccttaaagaagaaattctttaagtggatgctctcaaactcagggaaacctaaatctagttatagacaaggcaatcctgagccaagccgaagtagtaattagtaagaccagtggacaatcgacggataacagcatatctag

SEQ ID NO: 586 - DNA, 18 bp, synthetic construct
  misc_feature 1..18: note = T7 Promoter
  source 1..18: mol_type = other DNA
taatacgactcactatag

SEQ ID NO: 587 - DNA, 33 bp, synthetic construct
  misc_feature 1..33: note = Homology arm-1
  source 1..33: mol_type = other DNA
gggagaccctcgaccgtcgattgtccactggtc

SEQ ID NO: 588 - DNA, 182 bp, synthetic construct
  misc_feature 1..182: note = Anabaena intron-1
  source 1..182: mol_type = other DNA
aacaatagatgacttacaactaatcggaaggtgcagagactcgacgggagctaccctaacgtcaagacgagggtaaagagagagtccaattctcaaagccaataggcagtagcgaaagctgcaagagaatgaaaatccgttgaccttaaacggtcgtgtgggttcaagtccctccaccccca

SEQ ID NO: 589 - DNA, 40 bp, synthetic construct
  misc_feature 1..40: note = Spacer-1
  source 1..40: mol_type = other DNA
cgccggaaacgcaatagccgaaaaacaaaaaacaaaaaaa

SEQ ID NO: 590 - DNA, 741 bp, synthetic construct
  misc_feature 1..741: note = CVB3 IRES
  source 1..741: mol_type = other DNA
ttaaaacagcctgtgggttgatcccacccacaggcccattgggcgctagcactctggtatcacggtacctttgtgcgcctgttttataccccctcccccaactgtaacttagaagtaacacacaccgatcaacagtcagcgtggcacaccagccacgttttgatcaagcacttctgttaccccggactgagtatcaatagactgctcacgcggttgaaggagaaagcgttcgttatccggccaactacttcgaaaaacctagtaacaccgtggaagttgcagagtgtttcgctcagcactaccccagtgtagatcaggtcgatgagtcaccgcattccccacgggcgaccgtggcggtggctgcgttggcggcctgcccatggggaaacccatgggacgctctaatacagacatggtgcgaagagtctattgagctagttggtagtcctccggcccctgaatgcggctaatcctaactgcggagcacacaccctcaagccagagggcagtgtgtcgtaacgggcaactctgcagcggaaccgactactttgggtgtccgtgtttcattttattcctatactggctgcttatggtgacaattgagagatcgttaccatatagctattggattggccatccggtgactaatagagctattatatatccctttgttgggtttataccacttagcttgaaagaggttaaaacattacaattcattgttaagttgaatacagcaaa

SEQ ID NO: 591 - DNA, 40 bp, synthetic construct
  misc_feature 1..40: note = Spacer-2
  source 1..40: mol_type = other DNA
aaaaaacaaaaaacaaaacggctattatgcgttaccggcg

SEQ ID NO: 592 - DNA, 131 bp, synthetic construct
  misc_feature 1..131: note = Anabaena intron-2
  source 1..131: mol_type = other DNA
agacgctacggacttaaataattgagccttaaagaagaaattctttaagtggatgctctcaaactcagggaaacctaaatctagttatagacaaggcaatcctgagccaagccgaagtagtaattagtaag

SEQ ID NO: 593 - DNA, 35 bp, synthetic construct
  misc_feature 1..35: note = Homology arm-2
  source 1..35: mol_type = other DNA
accagtggacaatcgacggataacagcatatctag

SEQ ID NO: 594 - DNA, 45 bp, synthetic construct
  misc_feature 1..45: note = 45A
  source 1..45: mol_type = other DNA
aaaaaaaaaaaaaaaaaaaaaaaaaaaaaaaaaaaaaaaaaaaaa

SEQ ID NO: 595 - DNA, 70 bp, synthetic construct
  misc_feature 1..70: note = 70A
  source 1..70: mol_type = other DNA
aaaaaaaaaaaaaaaaaaaaaaaaaaaaaaaaaaaaaaaaaaaaaaaaaaaaaaaaaaaaaaaaaaaaaa

SEQ ID NO: 596 - DNA, 150 bp, synthetic construct
  misc_feature 1..150: note = 150A
  source 1..150: mol_type = other DNA
aaaaaaaaaaaaaaaaaaaaaaaaaaaaaaaaaaaaaaaaaaaaaaaaaaaaaaaaaaaaaaaaaaaaaaaaaaaaaaaaaaaaaaaaaaaaaaaaaaaaaaaaaaaaaaaaaaaaaaaaaaaaaaaaaaaaaaaaaaaaaaaaaaaaaa

SEQ ID NO: 597 - DNA, 290 bp, synthetic construct
  misc_feature 1..290: note = 3 UTR
  source 1..290: mol_type = other DNA
agctcgctttcttgctgtccaatttctattaaaggttcctttgttccctaagtccaactactaaactgggggatattatgaagggccttgagcatctggattctgcctaataaaaaacatttattttcattgctgcgtcgagagctcgctttcttgctgtccaatttctattaaaggttcctttgttccctaagtccaactactaaactgggggatattatgaagggccttgagcatctggattctgcctaataaaaaacatttattttcattgctgcctcgacgaattc

SEQ ID NO: 598 - protein, 241 aa, synthetic construct; identical to SEQ ID NO: 120
  REGION 1..241: note = anti-MSLN scFv in anti-MSLN M12.BBZ CAR

SEQ ID NO: 599 - protein, 464 aa, synthetic construct
  REGION 1..464: note = anti-MSLN M12.BBZ CAR without a signal peptide
AIRLTQSPSLLSASVGDRVTVTCRASQGGGNYLAWYQQKPGKAPKLLIYGASKLQSGVPSRFSGSGSGTEFTLTISSLQPEDFATYYCQQLNSYPVTFGQGTKVDIKGGGGSGGGGSGGGGSEVQLVESGAEVKKPGASVKVSCKASGYTFTTYYIHWVRQAPGQGLEWMGIINPSSGSTTYTQKFQGRVTMTRDTSTSTVYIELSGLRSEDTAVYYCARGETLRGYFDYWGQGTLVTVSSTTTPAPRPPTPAPTIASQPLSLRPEACRPAAGGAVHTRGLDFACDIYIWAPLAGTCGVLLLSLVITLYCKRGRKKLLYIFKQPFMRPVQTTQEEDGCSCRFPEEEEGGCELRVKFSRSADAPAYKQGQNQLYNELNLGRREEYDVLDKRRGRDPEMGGKPRRKNPQEGLYNELQKDKMAEAYSEIGMKGERRRGKGHDGLYQGLSTATKDTYDALHMQALPPR

SEQ ID NO: 600 - protein, 377 aa, synthetic construct
  REGION 1..377: note = A40C28
MALPVTALLLPLALLLHAARPQVQLVQSGAEVKKPGASVKVSCTASGFNIKDYYVHWVKQAPGQGLEWMGRIDPEDGDSKYAPKFQGKATMTADTSTSTVYMELSSLRSEDTAVYYCTTSYYVGTYGYWGQGTLVTVSSGGGGSGGGGSGGGGSDIQMTQSPSSLSASVGDRVTITCSASSSVSYMLWFQQKPGKAPKLLIYSTSNLASGVPSRFSGSGSGTDFTLTISSLQPEDFATYYCQQRTFYPYTFGGGTKVEIKRTASTTTPAPRPPTPAPTIASQPLSLRPEACRPAAGGAVHTRGLDFACDFWVLVVVGGVLACYSLLVTVAFIIFWVRSKRSRLLHSDYMNMTPRRPGPTRKHYQPYAPPRDFAAYRS

SEQ ID NO: 601 - protein, 885 aa, synthetic construct
  REGION 1..885: note = A40C.28-BCMA31.BBZ
MALPVTALLLPLALLLHAARPQVQLVQSGAEVKKPGASVKVSCTASGFNIKDYYVHWVKQAPGQGLEWMGRIDPEDGDSKYAPKFQGKATMTADTSTSTVYMELSSLRSEDTAVYYCTTSYYVGTYGYWGQGTLVTVSSGGGGSGGGGSGGGGSDIQMTQSPSSLSASVGDRVTITCSASSSVSYMLWFQQKPGKAPKLLIYSTSNLASGVPSRFSGSGSGTDFTLTISSLQPEDFATYYCQQRTFYPYTFGGGTKVEIKRTASTTTPAPRPPTPAPTIASQPLSLRPEACRPAAGGAVHTRGLDFACDFWVLVVVGGVLACYSLLVTVAFIIFWVRSKRSRLLHSDYMNMTPRRPGPTRKHYQPYAPPRDFAAYRSVKQTLNFDLLKLAGDVESNPGPMLLLVTSLLLCELPHPAFLLIPQSALTQPPSASGSPGQSVTISCTGTSSDVGTYNYVSWYQQHPGKAPKLMIYDVNQRPSGVPDRFSGSKSGNTASLTVSGLQAEDEADYYCSSYGGSNNLVFGGGTKVTVLGGGGSGGGGSGGGGSEVQLVESGGGLIQPGGSLRLSCAASGFTFSSYWMSWVRQSPGKGLEWVANIKPDGSDKYYVDSVKGRFTISRDNAKNSLDLQMNSLRGEDTAIYYCARGATTYGSWGQGTLVTVSSTTTPAPRPPTPAPTIASQPLSLRPEACRPAAGGAVHTRGLDFACDIYIWAPLAGTCGVLLLSLVITLYCKRGRKKLLYIFKQPFMRPVQTTQEEDGCSCRFPEEEEGGCELRVKFSRSADAPAYQQGQNQLYNELNLGRREEYDVLDKRRGRDPEMGGKPRRKNPQEGLYNELQKDKMAEAYSEIGMKGERRRGKGHDGLYQGLSTATKDTYDALHMQALPPR

SEQ ID NO: 602 - protein, 885 aa, synthetic construct
  REGION 1..885: note = BCMA31.BBZ-A40C.28
MLLLVTSLLLCELPHPAFLLIPQSALTQPPSASGSPGQSVTISCTGTSSDVGTYNYVSWYQQHPGKAPKLMIYDVNQRPSGVPDRFSGSKSGNTASLTVSGLQAEDEADYYCSSYGGSNNLVFGGGTKVTVLGGGGSGGGGSGGGGSEVQLVESGGGLIQPGGSLRLSCAASGFTFSSYWMSWVRQSPGKGLEWVANIKPDGSDKYYVDSVKGRFTISRDNAKNSLDLQMNSLRGEDTAIYYCARGATTYGSWGQGTLVTVSSTTTPAPRPPTPAPTIASQPLSLRPEACRPAAGGAVHTRGLDFACDIYIWAPLAGTCGVLLLSLVITLYCKRGRKKLLYIFKQPFMRPVQTTQEEDGCSCRFPEEEEGGCELRVKFSRSADAPAYQQGQNQLYNELNLGRREEYDVLDKRRGRDPEMGGKPRRKNPQEGLYNELQKDKMAEAYSEIGMKGERRRGKGHDGLYQGLSTATKDTYDALHMQALPPRVKQTLNFDLLKLAGDVESNPGPMALPVTALLLPLALLLHAARPQVQLVQSGAEVKKPGASVKVSCTASGFNIKDYYVHWVKQAPGQGLEWMGRIDPEDGDSKYAPKFQGKATMTADTSTSTVYMELSSLRSEDTAVYYCTTSYYVGTYGYWGQGTLVTVSSGGGGSGGGGSGGGGSDIQMTQSPSSLSASVGDRVTITCSASSSVSYMLWFQQKPGKAPKLLIYSTSNLASGVPSRFSGSGSGTDFTLTISSLQPEDFATYYCQQRTFYPYTFGGGTKVEIKRTASTTTPAPRPPTPAPTIASQPLSLRPEACRPAAGGAVHTRGLDFACDFWVLVVVGGVLACYSLLVTVAFIIFWVRSKRSRLLHSDYMNMTPRRPGPTRKHYQPYAPPRDFAAYRS

SEQ ID NO: 603 - protein, 27 aa, synthetic construct
  REGION 1..27: note = T4
GYIPEAPRDGQAYVRKDGEWVLLSTFL

SEQ ID NO: 604 - protein, 30 aa, synthetic construct
  REGION 1..30: note = (L)
EKKIEAIEKKIEAIEKKIEAIEAIEKKIEA

SEQ ID NO: 605 - protein, 20 aa, synthetic construct
  REGION 1..20: note = (S)
EKKIEAIEKKIEAIEKKIEA

SEQ ID NO: 606 - protein, 28 aa, synthetic construct
  REGION 1..28: note = GCN4II
EDKIEEILSKIYHIENEIARIKKLIGEA

SEQ ID NO: 607 - protein, 28 aa, synthetic construct
  REGION 1..28: note = GCN4II
EDKVEELLSKIYHIENRIARIEKLVGEA

SEQ ID NO: 608 - protein, 43 aa, synthetic construct
  REGION 1..43: note = Matrilin -1 (L)
EEDPCECKSIVKFQTKVEELINTLQQKLEAVAKRIEALENKII

SEQ ID NO: 609 - protein, 26 aa, synthetic construct
  REGION 1..26: note = Matrilin -1 (S)
EELINTLQQKLEAVAKRIEALENKII

SEQ ID NO: 610 - protein, 64 aa, synthetic construct
  REGION 1..64: note = XV
VTAFSNMDDMLQKAHLVIEGTFIYLRDSTEFFIRVRDGWKKLQLGELIPIPADSPPPPALSSNP

SEQ ID NO: 611 - protein, 261 aa, synthetic construct
  REGION 1..261: note = CD40L
MIETYNQTSPRSAATGLPISMKIFMYLLTVFLITQMIGSALFAVYLHRRLDKIEDERNLHEDFVFMKTIQRCNTGERSLSLLNCEEIKSQFEGFVKDIMLNKEETKKENSFEMQKGDQNPQIAAHVISEASSKTTSVLQWAEKGYYTMSNNLVTLENGKQLTVKRQGLYYIYAQVTFCSNREASSQAPFIASLCLKSPGRFERILLRAANTHSSAKPCGQQSIHLGGVFELQPGASVFVNVTDPSQVSHGTGFTSFGLLKL

SEQ ID NO: 612 - protein, 24 aa, synthetic construct
  REGION 1..24: note = CD40L
IFMYLLTVFLITQMIGSALFAVYL

SEQ ID NO: 613 - protein, 22 aa, synthetic construct
  REGION 1..22: note = CD40L
MIETYNQTSPRSAATGLPISMK

SEQ ID NO: 614 - protein, 215 aa, synthetic construct
  REGION 1..215: note = CD40L
HRRLDKIEDERNLHEDFVFMKTIQRCNTGERSLSLLNCEEIKSQFEGFVKDIMLNKEETKKENSFEMQKGDQNPQIAAHVISEASSKTTSVLQWAEKGYYTMSNNLVTLENGKQLTVKRQGLYYIYAQVTFCSNREASSQAPFIASLCLKSPGRFERILLRAANTHSSAKPCGQQSIHLGGVFELQPGASVFVNVTDPSQVSHGTGFTSFGLLKL

SEQ ID NO: 615 - protein, 220 aa, synthetic construct
  REGION 1..220: note = CD28
MLRLLLALNLFPSIQVTGNKILVKQSPMLVAYDNAVNLSCKYSYNLFSREFRASLHKGLDSAVEVCVVYGNYSQQLQVYSKTGFNCDGKLGNESVTFYLQNLYVNQTDIYFCKIEVMYPPPYLDNEKSNGTIIHVKGKHLCPSPLFPGPSKPFWVLVVVGGVLACYSLLVTVAFIIFWVRSKRSRLLHSDYMNMTPRRPGPTRKHYQPYAPPRDFAAYRS

SEQ ID NO: 616 - protein, 41 aa, synthetic construct
  REGION 1..41: note = CD28 cytoplasmic domain
RSKRSRLLHSDYMNMTPRRPGPTRKHYQPYAPPRDFAAYRS

SEQ ID NO: 617 - protein, 27 aa, synthetic construct
  REGION 1..27: note = CD28 transmembrane domain
FWVLVVVGGVLACYSLLVTVAFIIFWV

SEQ ID NO: 618 - protein, 255 aa, synthetic construct
  REGION 1..255: note = 4-1BB
MGNSCYNIVATLLLVLNFERTRSLQDPCSNCPAGTFCDNNRNQICSPCPPNSFSSAGGQRTCDICRQCKGVFRTRKECSSTSNAECDCTPGFHCLGAGCSMCEQDCKQGQELTKKGCKDCCFGTFNDQKRGICRPWTNCSLDGKSVLVNGTKERDVVCGPSPADLSPGASSVTPPAPAREPGHSPQIISFFLALTSTALLFLLFFLTLRFSVVKRGRKKLLYIFKQPFMRPVQTTQEEDGCSCRFPEEEEGGCEL

SEQ ID NO: 619 - protein, 42 aa, synthetic construct
  REGION 1..42: note = 4-1BB intracellular domain
KRGRKKLLYIFKQPFMRPVQTTQEEDGCSCRFPEEEEGGCEL

SEQ ID NO: 620 - protein, 27 aa, synthetic construct
  REGION 1..27: note = 4-1BB transmembrane domain
IISFFLALTSTALLFLLFFLTLRFSVV

SEQ ID NO: 621 - protein, 199 aa, synthetic construct
  REGION 1..199: note = ICOS
MKSGLWYFFLFCLRIKVLTGEINGSANYEMFIFHNGGVQILCKYPDIVQQFKMQLLKGGQILCDLTKTKGSGNTVSIKSLKFCHSQLSNNSVSFFLYNLDHSHANYYFCNLSIFDPPPFKVTLTGGYLHIYESQLCCQLKFWLPIGCAAFVVVCILGCILICWLTKKKYSSSVHDPNGEYMFMRAVNTAKKSRLTDVTL

SEQ ID NO: 622 - protein, 38 aa, synthetic construct
  REGION 1..38: note = ICOS
CWLTKKKYSSSVHDPNGEYMFMRAVNTAKKSRLTDVTL

SEQ ID NO: 623 - protein, 21 aa, synthetic construct
  REGION 1..21: note = ICOS
FWLPIGCAAFVVVCILGCILI

SEQ ID NO: 624 - protein, 260 aa, synthetic construct
  REGION 1..260: note = CD27
MARPHPWWLCVLGTLVGLSATPAPKSCPERHYWAQGKLCCQMCEPGTFLVKDCDQHRKAAQCDPCIPGVSFSPDHHTRPHCESCRHCNSGLLVRNCTITANAECACRNGWQCRDKECTECDPLPNPSLTARSSQALSPHPQPTHLPYVSEMLEARTAGHMQTLADFRQLPARTLSTHWPPQRSLCSSDFIRILVIFSGMFLVFTLAGALFLHQRRKYRSNKGESPVEPAEPCHYSCPREEEGSTIPIQEDYRKPEPACSP

SEQ ID NO: 625 - protein, 48 aa, synthetic construct
  REGION 1..48: note = CD27
QRRKYRSNKGESPVEPAEPCHYSCPREEEGSTIPIQEDYRKPEPACSP

SEQ ID NO: 626 - protein, 21 aa, synthetic construct
  REGION 1..21: note = CD27
ILVIFSGMFLVFTLAGALFLH

SEQ ID NO: 627 - protein, 277 aa, synthetic construct
  REGION 1..277: note = OX40
MCVGARRLGRGPCAALLLLGLGLSTVTGLHCVGDTYPSNDRCCHECRPGNGMVSRCSRSQNTVCRPCGPGFYNDVVSSKPCKPCTWCNLRSGSERKQLCTATQDTVCRCRAGTQPLDSYKPGVDCAPCPPGHFSPGDNQACKPWTNCTLAGKHTLQPASNSSDAICEDRDPPATQPQETQGPPARPITVQPTEAWPRTSQGPSTRPVEVPGGRAVAAILGLGLVLGLLGPLAILLALYLLRRDQRLPPDAHKPPGGGSFRTPIQEEQADAHSTLAKI

SEQ ID NO: 628 - protein, 42 aa, synthetic construct
  REGION 1..42: note = OX40
ALYLLRRDQRLPPDAHKPPGGGSFRTPIQEEQADAHSTLAKI

SEQ ID NO: 629 - protein, 21 aa, synthetic construct
  REGION 1..21: note = OX40
VAAILGLGLVLGLLGPLAILL

SEQ ID NO: 630 - protein, 93 aa, synthetic construct
  REGION 1..93: note = DAP10
MIHLGHILFLLLLPVAAAQTTPGERSSLPAFYPGTSGSCSGCGSLSLPLLAGLVAADAVASLLIVGAVFLCARPRRSPAQEDGKVYINMPGRG

SEQ ID NO: 631 - protein, 24 aa, synthetic construct
  REGION 1..24: note = DAP10
LCARPRRSPAQEDGKVYINMPGRG

SEQ ID NO: 632 - protein, 21 aa, synthetic construct
  REGION 1..21: note = DAP10
LLAGLVAADAVASLLIVGAVF

SEQ ID NO: 633 - protein, 595 aa, synthetic construct
  REGION 1..595: note = CD30
MRVLLAALGLLFLGALRAFPQDRPFEDTCHGNPSHYYDKAVRRCCYRCPMGLFPTQQCPQRPTDCRKQCEPDYYLDEADRCTACVTCSRDDLVEKTPCAWNSSRVCECRPGMFCSTSAVNSCARCFFHSVCPAGMIVKFPGTAQKNTVCEPASPGVSPACASPENCKEPSSGTIPQAKPTPVSPATSSASTMPVRGGTRLAQEAASKLTRAPDSPSSVGRPSSDPGLSPTQPCPEGSGDCRKQCEPDYYLDEAGRCTACVSCSRDDLVEKTPCAWNSSRTCECRPGMICATSATNSCARCVPYPICAAETVTKPQDMAEKDTTFEAPPLGTQPDCNPTPENGEAPASTSPTQSLLVDSQASKTLPIPTSAPVALSSTGKPVLDAGPVLFWVILVLVVVVGSSAFLLCHRRACRKRIRQKLHLCYPVQTSQPKLELVDSRPRRSSTQLRSGASVTEPVAEERGLMSQPLMETCHSVGAAYLESLPLQDASPAGGPSSPRDLPEPRVSTEHTNNKIEKIYIMKADTVIVGTVKAELPEGRGLAGPAEPELEEELEADHTPHYPEQETEPPLGSCSDVMLSVEEEGKEDPLPTAASGK

SEQ ID NO: 634 - protein, 189 aa, synthetic construct
  REGION 1..189: note = CD30
CHRRACRKRIRQKLHLCYPVQTSQPKLELVDSRPRRSSTQLRSGASVTEPVAEERGLMSQPLMETCHSVGAAYLESLPLQDASPAGGPSSPRDLPEPRVSTEHTNNKIEKIYIMKADTVIVGTVKAELPEGRGLAGPAEPELEEELEADHTPHYPEQETEPPLGSCSDVMLSVEEEGKEDPLPTAASGK

SEQ ID NO: 635 - protein, 21 aa, synthetic construct
  REGION 1..21: note = CD30
PVLFWVILVLVVVVGSSAFLL

SEQ ID NO: 636 - protein, 370 aa, synthetic construct
  REGION 1..370: note = 2B4
MLGQVVTLILLLLLKVYQGKGCQGSADHVVSISGVPLQLQPNSIQTKVDSIAWKKLLPSQNGFHHILKWENGSLPSNTSNDRFSFIVKNLSLLIKAAQQQDSGLYCLEVTSISGKVQTATFQVFVFESLLPDKVEKPRLQGQGKILDRGRCQVALSCLVSRDGNVSYAWYRGSKLIQTAGNLTYLDEEVDINGTHTYTCNVSNPVSWESHTLNLTQDCQNAHQEFRFWPFLVIIVILSALFLGTLACFCVWRRKRKEKQSETSPKEFLTIYEDVKDLKTRRNHEQEQTFPGGGSTIYSMIQSQSSAPTSQEPAYTLYSLIQPSRKSGSRKRNHSPSFNSTIYEVIGKSQPKAQNPARLSRKELENFDVYS

SEQ ID NO: 637 - protein, 120 aa, synthetic construct
  REGION 1..120: note = 2B4
WRRKRKEKQSETSPKEFLTIYEDVKDLKTRRNHEQEQTFPGGGSTIYSMIQSQSSAPTSQEPAYTLYSLIQPSRKSGSRKRNHSPSFNSTIYEVIGKSQPKAQNPARLSRKELENFDVYS

SEQ ID NO: 638 - protein, 21 aa, synthetic construct
  REGION 1..21: note = 2B4
FLVIIVILSALFLGTLACFCV

SEQ ID NO: 639 - protein, 351 aa, synthetic construct
  REGION 1..351: note = CD2
MSFPCKFVASFLLIFNVSSKGAVSKEITNALETWGALGQDINLDIPSFQMSDDIDDIKWEKTSDKKKIAQFRKEKETFKEKDTYKLFKNGTLKIKHLKTDDQDIYKVSIYDTKGKNVLEKIFDLKIQERVSKPKISWTCINTTLTCEVMNGTDPELNLYQDGKHLKLSQRVITHKWTTSLSAKFKCTAGNKVSKESSVEPVSCPEKGLDIYLIIGICGGGSLLMVFVALLVFYITKRKKQRSRRNDEELETRAHRVATEERGRKPHQIPASTPQNPATSQHPPPPPGHRSQAPSHRPPPPGHRVQHQPQKRPPAPSGTQVHQQKGPPLPRPRVQPKPPHGAAENSLSPSSN

SEQ ID NO: 640 - protein, 116 aa, synthetic construct
  REGION 1..116: note = CD2
KRKKQRSRRNDEELETRAHRVATEERGRKPHQIPASTPQNPATSQHPPPPPGHRSQAPSHRPPPPGHRVQHQPQKRPPAPSGTQVHQQKGPPLPRPRVQPKPPHGAAENSLSPSSN

SEQ ID NO: 641 - protein, 26 aa, synthetic construct
  REGION 1..26: note = CD2
IYLIIGICGGGSLLMVFVALLVFYIT

SEQ ID NO: 642 - protein, 240 aa, synthetic construct
  REGION 1..240: note = LIGHT
MEESVVRPSVFVVDGQTDIPFTRLGRSHRRQSCSVARVGLGLLLLLMGAGLAVQGWFLLQLHWRLGEMVTRLPDGPAGSWEQLIQERRSHEVNPAAHLTGANSSLTGSGGPLLWETQLGLAFLRGLSYHDGALVVTKAGYYYIYSKVQLGGVGCPLGLASTITHGLYKRTPRYPEELELLVSQQSPCGRATSSSRVWWDSSFLGGVVHLEAGEKVVVRVLDERLVRLRDGTRSYFGAFMV

SEQ ID NO: 643 - protein, 37 aa, synthetic construct
  REGION 1..37: note = LIGHT
MEESVVRPSVFVVDGQTDIPFTRLGRSHRRQSCSVAR

SEQ ID NO: 644 - protein, 21 aa, synthetic construct
  REGION 1..21: note = LIGHT
VGLGLLLLLMGAGLAVQGWFL

SEQ ID NO: 645 - protein, 241 aa, synthetic construct
  REGION 1..241: note = GITR
MAQHGAMGAFRALCGLALLCALSLGQRPTGGPGCGPGRLLLGTGTDARCCRVHTTRCCRDYPGEECCSEWDCMCVQPEFHCGDPCCTTCRHHPCPPGQGVQSQGKFSFGFQCIDCASGTFSGGHEGHCKPWTDCTQFGFLTVFPGNKTHNAVCVPGSPPAEPLGWLTVVLLAVAACVLLLTSAQLGLHIWQLRSQCMWPRETQLLLEVPPSTEDARSCQFPEEERGERSAEEKGRLGDLWV

SEQ ID NO: 646 - protein, 58 aa, synthetic construct
  REGION 1..58: note = GITR
QLGLHIWQLRSQCMWPRETQLLLEVPPSTEDARSCQFPEEERGERSAEEKGRLGDLWV

SEQ ID NO: 647 - protein, 21 aa, synthetic construct
  REGION 1..21: note = GITR
LGWLTVVLLAVAACVLLLTSA

SEQ ID NO: 648 - protein, 417 aa, synthetic construct
  REGION 1..417: note = DR3
MEQRPRGCAAVAAALLLVLLGARAQGGTRSPRCDCAGDFHKKIGLFCCRGCPAGHYLKAPCTEPCGNSTCLVCPQDTFLAWENHHNSECARCQACDEQASQVALENCSAVADTRCGCKPGWFVECQVSQCVSSSPFYCQPCLDCGALHRHTRLLCSRRDTDCGTCLPGFYEHGDGCVSCPTSTLGSCPERCAAVCGWRQMFWVQVLLAGLVVPLLLGATLTYTYRHCWPHKPLVTADEAGMEALTPPPATHLSPLDSAHTLLAPPDSSEKICTVQLVGNSWTPGYPETQEALCPQVTWSWDQLPSRALGPAAAPTLSPESPAGSPAMMLQPGPQLYDVMDAVPARRWKEFVRTLGLREAEIEAVEVEIGRFRDQQYEMLKRWRQQQPAGLGAVYAALERMGLDGCVEDLRSRLQRGP

SEQ ID NO: 649 - protein, 197 aa, synthetic construct
  REGION 1..197: note = DR3
TYTYRHCWPHKPLVTADEAGMEALTPPPATHLSPLDSAHTLLAPPDSSEKICTVQLVGNSWTPGYPETQEALCPQVTWSWDQLPSRALGPAAAPTLSPESPAGSPAMMLQPGPQLYDVMDAVPARRWKEFVRTLGLREAEIEAVEVEIGRFRDQQYEMLKRWRQQQPAGLGAVYAALERMGLDGCVEDLRSRLQRGP

SEQ ID NO: 650 - protein, 21 aa, synthetic construct
  REGION 1..21: note = DR3
MFWVQVLLAGLVVPLLLGATL

SEQ ID NO: 651 - protein, 181 aa, synthetic construct
  REGION 1..181: note = CD160
MLLEPGRGCCALAILLAIVDIQSGGCINITSSASQEGTRLNLICTVWHKKEEAEGFVVFLCKDRSGDCSPETSLKQLRLKRDPGIDGVGEISSQLMFTISQVTPLHSGTYQCCARSQKSGIRLQGHFFSILFTETGNYTVTGLKQRQHLEFSHNEGTLSSGFLQEKVWVMLVTSLVALQAL

SEQ ID NO: 652 - protein, 400 aa, synthetic construct
  REGION 1..400: note = CD43
MATLLLLLGVLVVSPDALGSTTAVQTPTSGEPLVSTSEPLSSKMYTTSITSDPKADSTGDQTSALPPSTSINEGSPLWTSIGASTGSPLPEPTTYQEVSIKMSSVPQETPHATSHPAVPITANSLGSHTVTGGTITTNSPETSSRTSGAPVTTAASSLETSRGTSGPPLTMATVSLETSKGTSGPPVTMATDSLETSTGTTGPPVTMTTGSLEPSSGASGPQVSSVKLSTMMSPTTSTNASTVPFRNPDENSRGMLPVAVLVALLAVIVLVALLLLWRRRQKRRTGALVLSRGGKRNGVVDAWAGPAQVPEEGAVTVTVGGSGGDKGSGFPDGEGSSRRPTLTTFFGRRKSRQGSLAMEELKSGSGPSLKGEEEPLVASEDGAVDAPAPDEPEGGDGAAP

SEQ ID NO: 653 - protein, 124 aa, synthetic construct
  REGION 1..124: note = CD43
WRRRQKRRTGALVLSRGGKRNGVVDAWAGPAQVPEEGAVTVTVGGSGGDKGSGFPDGEGSSRRPTLTTFFGRRKSRQGSLAMEELKSGSGPSLKGEEEPLVASEDGAVDAPAPDEPEGGDGAAP

SEQ ID NO: 654 - protein, 23 aa, synthetic construct
  REGION 1..23: note = CD43
GMLPVAVLVALLAVIVLVALLLL

SEQ ID NO: 655 - protein, 243 aa, synthetic construct
  REGION 1..243: note = CD48
MCSRGWDSCLALELLLLPLSLLVTSIQGHLVHMTVVSGSNVTLNISESLPENYKQLTWFYTFDQKIVEWDSRKSKYFESKFKGRVRLDPQSGALYISKVQKEDNSTYIMRVLKKTGNEQEWKIKLQVLDPVPKPVIKIEKIEDMDDNCYLKLSCVIPGESVNYTWYGDKRPFPKELQNSVLETTLMPHNYSRCYTCQVSNSVSSKNGTVCLSPPCTLARSFGVEWIASWLVVTVPTILGLLLT

SEQ ID NO: 656 - protein, 288 aa, synthetic construct
  REGION 1..288: note = CD80
MGHTRRQGTSPSKCPYLNFFQLLVLAGLSHFCSGVIHVTKEVKEVATLSCGHNVSVEELAQTRIYWQKEKKMVLTMMSGDMNIWPEYKNRTIFDITNNLSIVILALRPSDEGTYECVVLKYEKDAFKREHLAEVTLSVKADFPTPSISDFEIPTSNIRRIICSTSGGFPEPHLSWLENGEELNAINTTVSQDPETELYAVSSKLDFNMTTNHSFMCLIKYGHLRVNQTFNWNTTKQEHFPDNLLPSWAITLISVNGIFVICCLTYCFAPRCRERRRNERLRRESVRPV

SEQ ID NO: 657 - protein, 25 aa, synthetic construct
  REGION 1..25: note = CD80
TYCFAPRCRERRRNERLRRESVRPV

SEQ ID NO: 658 - protein, 21 aa, synthetic construct
  REGION 1..21: note = CD 80
LLPSWAITLISVNGIFVICCL

SEQ ID NO: 659 - protein, 329 aa, synthetic construct
  REGION 1..329: note = CD 86
MDPQCTMGLSNILFVMAFLLSGAAPLKIQAYFNETADLPCQFANSQNQSLSELVVFWQDQENLVLNEVYLGKEKFDSVHSKYMGRTSFDSDSWTLRLHNLQIKDKGLYQCIIHHKKPTGMIRIHQMNSELSVLANFSQPEIVPISNITENVYINLTCSSIHGYPEPKKMSVLLRTKNSTIEYDGVMQKSQDNVTELYDVSISLSVSFPDVTSNMTIFCILETDKTRLLSSPFSIELEDPQPPPDHIPWITAVLPTVIICVMVFCLILWKWKKKKRPRNSYKCGTNTMEREESEQTKKREKIHIPERSDEAQRVFKSSKTSSCDKSDTCF

SEQ ID NO: 660 - protein, 61 aa, synthetic construct
  REGION 1..61: note = CD 86
KWKKKKRPRNSYKCGTNTMEREESEQTKKREKIHIPERSDEAQRVFKSSKTSSCDKSDTCF

SEQ ID NO: 661 - protein, 21 aa, synthetic construct
  REGION 1..21: note = CD 86
WITAVLPTVIICVMVFCLILW

SEQ ID NO: 662 - protein, 4544 aa, synthetic construct
  REGION 1..4544: note = CD 91/LRP1
MLTPPLLLLLPLLSALVAAAIDAPKTCSPKQFACRDQITCISKGWRCDGERDCPDGSDEAPEICPQSKAQRCQPNEHNCLGTELCVPMSRLCNGVQDCMDGSDEGPHCRELQGNCSRLGCQHHCVPTLDGPTCYCNSSFQLQADGKTCKDFDECSVYGTCSQLCTNTDGSFICGCVEGYLLQPDNRSCKAKNEPVDRPPVLLIANSQNILATYLSGAQVSTITPTSTRQTTAMDFSYANETVCWVHVGDSAAQTQLKCARMPGLKGFVDEHTINISLSLHHVEQMAIDWLTGNFYFVDDIDDRIFVCNRNGDTCVTLLDLELYNPKGIALDPAMGKVFFTDYGQIPKVERCDMDGQNRTKLVDSKIVFPHGITLDLVSRLVYWADAYLDYIEVVDYEGKGRQTIIQGILIEHLYGLTVFENYLYATNSDNANAQQKTSVIRVNRFNSTEYQVVTRVDKGGALHIYHQRRQPRVRSHACENDQYGKPGGCSDICLLANSHKARTCRCRSGFSLGSDGKSCKKPEHELFLVYGKGRPGIIRGMDMGAKVPDEHMIPIENLMNPRALDFHAETGFIYFADTTSYLIGRQKIDGTERETILKDGIHNVEGVAVDWMGDNLYWTDDGPKKTISVARLEKAAQTRKTLIEGKMTHPRAIVVDPLNGWMYWTDWEEDPKDSRRGRLERAWMDGSHRDIFVTSKTVLWPNGLSLDIPAGRLYWVDAFYDRIETILLNGTDRKIVYEGPELNHAFGLCHHGNYLFWTEYRSGSVYRLERGVGGAPPTVTLLRSERPPIFEIRMYDAQQQQVGTNKCRVNNGGCSSLCLATPGSRQCACAEDQVLDADGVTCLANPSYVPPPQCQPGEFACANSRCIQERWKCDGDNDCLDNSDEAPALCHQHTCPSDRFKCENNRCIPNRWLCDGDNDCGNSEDESNATCSARTCPPNQFSCASGRCIPISWTCDLDDDCGDRSDESASCAYPTCFPLTQFTCNNGRCININWRCDNDNDCGDNSDEAGCSHSCSSTQFKCNSGRCIPEHWTCDGDNDCGDYSDETHANCTNQATRPPGGCHTDEFQCRLDGLCIPLRWRCDGDTDCMDSSDEKSCEGVTHVCDPSVKFGCKDSARCISKAWVCDGDNDCEDNSDEENCESLACRPPSHPCANNTSVCLPPDKLCDGNDDCGDGSDEGELCDQCSLNNGGCSHNCSVAPGEGIVCSCPLGMELGPDNHTCQIQSYCAKHLKCSQKCDQNKFSVKCSCYEGWVLEPDGESCRSLDPFKPFIIFSNRHEIRRIDLHKGDYSVLVPGLRNTIALDFHLSQSALYWTDVVEDKIYRGKLLDNGALTSFEVVIQYGLATPEGLAVDWIAGNIYWVESNLDQIEVAKLDGTLRTTLLAGDIEHPRAIALDPRDGILFWTDWDASLPRIEAASMSGAGRRTVHRETGSGGWPNGLTVDYLEKRILWIDARSDAIYSARYDGSGHMEVLRGHEFLSHPFAVTLYGGEVYWTDWRTNTLAKANKWTGHNVTVVQRTNTQPFDLQVYHPSRQPMAPNPCEANGGQGPCSHLCLINYNRTVSCACPHLMKLHKDNTTCYEFKKFLLYARQMEIRGVDLDAPYYNYIISFTVPDIDNVTVLDYDAREQRVYWSDVRTQAIKRAFINGTGVETVVSADLPNAHGLAVDWVSRNLFWTSYDTNKKQINVARLDGSFKNAVVQGLEQPHGLVVHPLRGKLYWTDGDNISMANMDGSNRTLLFSGQKGPVGLAIDFPESKLYWISSGNHTINRCNLDGSGLEVIDAMRSQLGKATALAIMGDKLWWADQVSEKMGTCSKADGSGSVVLRNSTTLVMHMKVYDESIQLDHKGTNPCSVNNGDCSQLCLPTSETTRSCMCTAGYSLRSGQQACEGVGSFLLYSVHEGIRGIPLDPNDKSDALVPVSGTSLAVGIDFHAENDTIYWVDMGLSTISRAKRDQTWREDVVTNGIGRVEGIAVDWIAGNIYWTDQGFDVIEVARLNGSFRYVVISQGLDKPRAITVHPEKGYLFWTEWGQYPRIERSRLDGTERVVLVNVSISWPNGISVDYQDGKLYWCDARTDKIERIDLETGENREVVLSSNNMDMFSVSVFEDFIYWSDRTHANGSIKRGSKDNATDSVPLRTGIGVQLKDIKVFNRDRQKGTNVCAVANGGCQQLCLYRGRGQRACACAHGMLAEDGASCREYAGYLLYSERTILKSIHLSDERNLNAPVQPFEDPEHMKNVIALAFDYRAGTSPGTPNRIFFSDIHFGNIQQINDDGSRRITIVENVGSVEGLAYHRGWDTLYWTSYTTSTITRHTVDQTRPGAFERETVITMSGDDHPRAFVLDECQNLMFWTNWNEQHPSIMRAALSGANVLTLIEKDIRTPNGLAIDHRAEKLYFSDATLDKIERCEYDGSHRYVILKSEPVHPFGLAVYGEHIFWTDWVRRAVQRANKHVGSNMKLLRVDIPQQPMGIIAVANDTNSCELSPCRINNGGCQDLCLLTHQGHVNCSCRGGRILQDDLTCRAVNSSCRAQDEFECANGECINFSLTCDGVPHCKDKSDEKPSYCNSRRCKKTFRQCSNGRCVSNMLWCNGADDCGDGSDEIPCNKTACGVGEFRCRDGTCIGNSSRCNQFVDCEDASDEMNCSATDCSSYFRLGVKGVLFQPCERTSLCYAPSWVCDGANDCGDYSDERDCPGVKRPRCPLNYFACPSGRCIPMSWTCDKEDDCEHGEDETHCNKFCSEAQFECQNHRCISKQWLCDGSDDCGDGSDEAAHCEGKTCGPSSFSCPGTHVCVPERWLCDGDKDCADGADESIAAGCLYNSTCDDREFMCQNRQCIPKHFVCDHDRDCADGSDESPECEYPTCGPSEFRCANGRCLSSRQWECDGENDCHDQSDEAPKNPHCTSQEHKCNASSQFLCSSGRCVAEALLCNGQDDCGDSSDERGCHINECLSRKLSGCSQDCEDLKIGFKCRCRPGFRLKDDGRTCADVDECSTTFPCSQRCINTHGSYKCLCVEGYAPRGGDPHSCKAVTDEEPFLIFANRYYLRKLNLDGSNYTLLKQGLNNAVALDFDYREQMIYWTDVTTQGSMIRRMHLNGSNVQVLHRTGLSNPDGLAVDWVGGNLYWCDKGRDTIEVSKLNGAYRTVLVSSGLREPRALVVDVQNGYLYWTDWGDHSLIGRIGMDGSSRSVIVDTKITWPNGLTLDYVTERIYWADAREDYIEFASLDGSNRHVVLSQDIPHIFALTLFEDYVYWTDWETKSINRAHKTTGTNKTLLISTLHRPMDLHVFHALRQPDVPNHPCKVNNGGCSNLCLLSPGGGHKCACPTNFYLGSDGRTCVSNCTASQFVCKNDKCIPFWWKCDTEDDCGDHSDEPPDCPEFKCRPGQFQCSTGICTNPAFICDGDNDCQDNSDEANCDIHVCLPSQFKCTNTNRCIPGIFRCNGQDNCGDGEDERDCPEVTCAPNQFQCSITKRCIPRVWVCDRDNDCVDGSDEPANCTQMTCGVDEFRCKDSGRCIPARWKCDGEDDCGDGSDEPKEECDERTCEPYQFRCKNNRCVPGRWQCDYDNDCGDNSDEESCTPRPCSESEFSCANGRCIAGRWKCDGDHDCADGSDEKDCTPRCDMDQFQCKSGHCIPLRWRCDADADCMDGSDEEACGTGVRTCPLDEFQCNNTLCKPLAWKCDGEDDCGDNSDENPEECARFVCPPNRPFRCKNDRVCLWIGRQCDGTDNCGDGTDEEDCEPPTAHTTHCKDKKEFLCRNQRCLSSSLRCNMFDDCGDGSDEEDCSIDPKLTSCATNASICGDEARCVRTEKAAYCACRSGFHTVPGQPGCQDINECLRFGTCSQLCNNTKGGHLCSCARNFMKTHNTCKAEGSEYQVLYIADDNEIRSLFPGHPHSAYEQAFQGDESVRIDAMDVHVKAGRVYWTNWHTGTISYRSLPPAAPPTTSNRHRRQIDRGVTHLNISGLKMPRGIAIDWVAGNVYWTDSGRDVIEVAQMKGENRKTLISGMIDEPHAIVVDPLRGTMYWSDWGNHPKIETAAMDGTLRETLVQDNIQWPTGLAVDYHNERLYWADAKLSVIGSIRLNGTDPIVAADSKRGLSHPFSIDVFEDYIYGVTYINNRVFKIHKFGHSPLVNLTGGLSHASDVVLYHQHKQPEVTNPCDRKKCEWLCLLSPSGPVCTCPNGKRLDNGTCVPVPSPTPPPDAPRPGTCNLQCFNGGSCFLNARRQPKCRCQPRYTGDKCELDQCWEHCRNGGTCAASPSGMPTCRCPTGFTGPKCTQQVCAGYCANNSTCTVNQGNQPQCRCLPGFLGDRCQYRQCSGYCENFGTCQMAADGSRQCRCTAYFEGSRCEVNKCSRCLEGACVVNKQSGDVTCNCTDGRVAPSCLTCVGHCSNGGSCTMNSKMMPECQCPPHMTGPRCEEHVFSQQQPGHIASILIPLLLLLLLVLVAGVVFWYKRRVQGAKGFQHQRMTNGAMNVEIGNPTYKMYEGGEPDDVGGLLDADFALDPDKPTNFTNPVYATLYMGGHGSRHSLASTDEKRELLGRGPEDEIGDPLA

SEQ ID NO: 663 - protein, 100 aa, synthetic construct
  REGION 1..100: note = CD 91
KRRVQGAKGFQHQRMTNGAMNVEIGNPTYKMYEGGEPDDVGGLLDADFALDPDKPTNFTNPVYATLYMGGHGSRHSLASTDEKRELLGRGPEDEIGDPLA

SEQ ID NO: 664 - protein, 25 aa, synthetic construct
  REGION 1..25: note = CD 91
HIASILIPLLLLLLLVLVAGVVFWY

SEQ ID NO: 665 - protein, 1722 aa, synthetic construct
  REGION 1..1722: note = DEC-205
MRTGWATPRRPAGLLMLLFWFFDLAEPSGRAANDPFTIVHGNTGKCIKPVYGWIVADDCDETEDKLWKWVSQHRLFHLHSQKCLGLDITKSVNELRMFSCDSSAMLWWKCEHHSLYGAARYRLALKDGHGTAISNASDVWKKGGSEESLCDQPYHEIYTRDGNSYGRPCEFPFLIDGTWHHDCILDEDHSGPWCATTLNYEYDRKWGICLKPENGCEDNWEKNEQFGSCYQFNTQTALSWKEAYVSCQNQGADLLSINSAAELTYLKEKEGIAKIFWIGLNQLYSARGWEWSDHKPLNFLNWDPDRPSAPTIGGSSCARMDAESGLWQSFSCEAQLPYVCRKPLNNTVELTDVWTYSDTRCDAGWLPNNGFCYLLVNESNSWDKAHAKCKAFSSDLISIHSLADVEVVVTKLHNEDIKEEVWIGLKNINIPTLFQWSDGTEVTLTYWDENEPNVPYNKTPNCVSYLGELGQWKVQSCEEKLKYVCKRKGEKLNDASSDKMCPPDEGWKRHGETCYKIYEDEVPFGTNCNLTITSRFEQEYLNDLMKKYDKSLRKYFWTGLRDVDSCGEYNWATVGGRRRAVTFSNWNFLEPASPGGCVAMSTGKSVGKWEVKDCRSFKALSICKKMSGPLGPEEASPKPDDPCPEGWQSFPASLSCYKVFHAERIVRKRNWEEAERFCQALGAHLSSFSHVDEIKEFLHFLTDQFSGQHWLWIGLNKRSPDLQGSWQWSDRTPVSTIIMPNEFQQDYDIRDCAAVKVFHRPWRRGWHFYDDREFIYLRPFACDTKLEWVCQIPKGRTPKTPDWYNPDRAGIHGPPLIIEGSEYWFVADLHLNYEEAVLYCASNHSFLATITSFVGLKAIKNKIANISGDGQKWWIRISEWPIDDHFTYSRYPWHRFPVTFGEECLYMSAKTWLIDLGKPTDCSTKLPFICEKYNVSSLEKYSPDSAAKVQCSEQWIPFQNKCFLKIKPVSLTFSQASDTCHSYGGTLPSVLSQIEQDFITSLLPDMEATLWIGLRWTAYEKINKWTDNRELTYSNFHPLLVSGRLRIPENFFEEESRYHCALILNLQKSPFTGTWNFTSCSERHFVSLCQKYSEVKSRQTLQNASETVKYLNNLYKIIPKTLTWHSAKRECLKSNMQLVSITDPYQQAFLSVQALLHNSSLWIGLFSQDDELNFGWSDGKRLHFSRWAETNGQLEDCVVLDTDGFWKTVDCNDNQPGAICYYSGNETEKEVKPVDSVKCPSPVLNTPWIPFQNCCYNFIITKNRHMATTQDEVHTKCQKLNPKSHILSIRDEKENNFVLEQLLYFNYMASWVMLGITYRNKSLMWFDKTPLSYTHWRAGRPTIKNEKFLAGLSTDGFWDIQTFKVIEEAVYFHQHSILACKIEMVDYKEEYNTTLPQFMPYEDGIYSVIQKKVTWYEALNMCSQSGGHLASVHNQNGQLFLEDIVKRDGFPLWVGLSSHDGSESSFEWSDGSTFDYIPWKGQTSPGNCVLLDPKGTWKHEKCNSVKDGAICYKPTKSKKLSRLTYSSRCPAAKENGSRWIQYKGHCYKSDQALHSFSEAKKLCSKHDHSATIVSIKDEDENKFVSRLMRENNNITMRVWLGLSQHSVDQSWSWLDGSEVTFVKWENKSKSGVGRCSMLIASNETWKKVECEHGFGRVVCKVPLGPDYTAIAIIVATLSILVLMGGLIWFLFQRHRLHLAGFSSVRYAQGVNEDEIMLPSFHD

SEQ ID NO: 666 - protein, 31 aa, synthetic construct
  REGION 1..31: note = DEC-205
QRHRLHLAGFSSVRYAQGVNEDEIMLPSFHD

SEQ ID NO: 667 - protein, 25 aa, synthetic construct
  REGION 1..25: note = DEC-205
YTAIAIIVATLSILVLMGGLIWFLF

SEQ ID NO: 668 - protein, 404 aa, synthetic construct
  REGION 1..404: note = DC-SIGN
MSDSKEPRLQQLGLLEEEQLRGLGFRQTRGYKSLAGCLGHGPLVLQLLSFTLLAGLLVQVSKVPSSISQEQSRQDAIYQNLTQLKAAVGELSEKSKLQEIYQELTQLKAAVGELPEKSKLQEIYQELTRLKAAVGELPEKSKLQEIYQELTWLKAAVGELPEKSKMQEIYQELTRLKAAVGELPEKSKQQEIYQELTRLKAAVGELPEKSKQQEIYQELTRLKAAVGELPEKSKQQEIYQELTQLKAAVERLCHPCPWEWTFFQGNCYFMSNSQRNWHDSITACKEVGAQLVVIKSAEEQNFLQLQSSRSNRFTWMGLSDLNQEGTWQWVDGSPLLPSFKQYWNRGEPNNVGEEDCAEFSGNGWNDDKCNLAKFWICKKSAASCSRDEEQFLSPAPATPNPPPA

SEQ ID NO: 669 - protein, 37 aa, synthetic construct
  REGION 1..37: note = DC-SIGN
MSDSKEPRLQQLGLLEEEQLRGLGFRQTRGYKSLAGC

SEQ ID NO: 670 - protein, 21 aa, synthetic construct
  REGION 1..21: note = DC-SIGN
LGHGPLVLQLLSFTLLAGLLV

SEQ ID NO: 671 - protein, 45 aa, synthetic construct
  REGION 1..45: note = CD8
TTTPAPRPPTPAPTIASQPLSLRPEACRPAAGGAVHTRGLDFACD

SEQ ID NO: 672 - protein, 43 aa, synthetic construct
  REGION 1..43: note = CD28
VAAAIEVMYPPPYLDNEKSNGTIIHVKGKHLCPSPLFPGPSKP

SEQ ID NO: 673 - protein, 35 aa, synthetic construct
  REGION 1..35: note = IgG Fc
AKTTPPSVYGRVTVSSAEPKSCDKTHTCPPCPDPK

SEQ ID NO: 674 - protein, 266 aa, synthetic construct
  REGION 1..266: note = 1412 scFV
ALPVTALLLPLALLLHAARPQVQLVQSGAEVKKPGASVKVSCKASGYTFTSYYIHWVRQAPGQGLEWIGCIYPGNVNTNYNEKFKDRATLTVDTSISTAYMELSRLRSDDTAVYFCTRSHYGLDWNFDVWGQGTTVTVSSVEGGSGGSGGSGGSGGVMDDIQMTQSPSSLSASVGDRVTITCHASQNIYVWLNWYQQKPGKAPKLLIYKASNLHTGVPSRFSGSGSGTDFTLTISSLQPEDFATYYCQQGQTYPYTFGGGTKVEIK

SEQ ID NO: 675 - protein, 120 aa, synthetic construct
  REGION 1..120: note = 1412
QVQLVQSGAEVKKPGASVKVSCKASGYTFTSYYIHWVRQAPGQGLEWIGCIYPGNVNTNYNEKFKDRATLTVDTSISTAYMELSRLRSDDTAVYFCTRSHYGLDWNFDVWGQGTTVTVSS

SEQ ID NO: 676 - protein, 110 aa, synthetic construct
  REGION 1..110: note = 1412
VMDDIQMTQSPSSLSASVGDRVTITCHASQNIYVWLNWYQQKPGKAPKLLIYKASNLHTGVPSRFSGSGSGTDFTLTISSLQPEDFATYYCQQGQTYPYTFGGGTKVEIK

SEQ ID NO: 677 - protein, 249 aa, synthetic construct
  REGION 1..249: note = F2.103 scFV
EVQLVESGGGLVQPGGSLRLSCAVSGFTFSTYWMHWVRQAPGKGLVWVSRINSDGSSTTYADSVKGRFTISRDNAKNTLYLQMNSLRAEDTAVYYCARDRVLWIGELSYYGMDVWGQGTTVTVSSGGGGSGGGGSGGGGSDIQMTQSPSTLSASVGDRVTITCRASQSISNWLAWYQQKPGKAPKLLLYKASGLESGVPSRFSGSGSGTEFTLTINSLQPDDFATYYCQQSNSYSWTFGHGTKVEIKRT

SEQ ID NO: 678 - protein, 125 aa, synthetic construct
  REGION 1..125: note = F2.103
EVQLVESGGGLVQPGGSLRLSCAVSGFTFSTYWMHWVRQAPGKGLVWVSRINSDGSSTTYADSVKGRFTISRDNAKNTLYLQMNSLRAEDTAVYYCARDRVLWIGELSYYGMDVWGQGTTVTVSS

SEQ ID NO: 679 - protein, 109 aa, synthetic construct
  REGION 1..109: note = F2.103
DIQMTQSPSTLSASVGDRVTITCRASQSISNWLAWYQQKPGKAPKLLLYKASGLESGVPSRFSGSGSGTEFTLTINSLQPDDFATYYCQQSNSYSWTFGHGTKVEIKRT

SEQ ID NO: 680 - protein, 261 aa, synthetic construct
  REGION 1..261: note = F5.157 scFV
EVQLLESGGGLVQPGGSLRLSCAASGFAFSSYAMSWVRQAPGKGLEWVSAISGSGGSTYYADSVKGRFTISRDNSKNTLYLQMNSLRPRTRPYITVRKMGGTMVRGVMGTLTTGAREPWSPSPQGGGGSGGGGSGGGGSIQMTQSPSSVSASAGDRVTITCRASQGISSWLAWYQQKPGKAPKLLIYAGSSLQSGVPSRFSGSGFGTDFTLTIGSLQPEDFATYYCQQASSFPRTFGQGTKVEIKRTVLHHLSSSSRHLMS

SEQ ID NO: 681 - protein, 124 aa, synthetic construct
  REGION 1..124: note = F5.157
EVQLLESGGGLVQPGGSLRLSCAASGFAFSSYAMSWVRQAPGKGLEWVSAISGSGGSTYYADSVKGRFTISRDNSKNTLYLQMNSLRPRTRPYITVRKMGGTMVRGVMGTLTTGAREPWSPSPQ

SEQ ID NO: 682 - protein, 122 aa, synthetic construct
  REGION 1..122: note = F5.157
IQMTQSPSSVSASAGDRVTITCRASQGISSWLAWYQQKPGKAPKLLIYAGSSLQSGVPSRFSGSGFGTDFTLTIGSLQPEDFATYYCQQASSFPRTFGQGTKVEIKRTVLHHLSSSSRHLMS

SEQ ID NO: 683 - protein, 248 aa, synthetic construct
  REGION 1..248: note = F5.77 scFV
EVQLLESGGGLVQPGGSLRLSCAASGFTFSSYAMSWVRQAPGKGLEWVSAISGSGGSTYYADSVKGRFTISRDNSKNTLYLQMNSLRAEDTAVYYCAKDGGYYGSGSYGYFDYWGQGTLVTVSSGGGGSGGGGSGGGGSDIQMTQSPSSVSGSVGDRVTITCRASQGISSWLAWYQQKPGKAPKLLIYAGSSLQSGVPSRFSGSGFGTDFTLTISSLQPEDFATYYCQQASSFPRTFGQGTKVEIKRT

SEQ ID NO: 684 - protein, 124 aa, synthetic construct
  REGION 1..124: note = F5.77
EVQLLESGGGLVQPGGSLRLSCAASGFTFSSYAMSWVRQAPGKGLEWVSAISGSGGSTYYADSVKGRFTISRDNSKNTLYLQMNSLRAEDTAVYYCAKDGGYYGSGSYGYFDYWGQGTLVTVSS

SEQ ID NO: 685 - protein, 109 aa, synthetic construct
  REGION 1..109: note = F5.77
DIQMTQSPSSVSGSVGDRVTITCRASQGISSWLAWYQQKPGKAPKLLIYAGSSLQSGVPSRFSGSGFGTDFTLTISSLQPEDFATYYCQQASSFPRTFGQGTKVEIKRT

SEQ ID NO: 686 - protein, 247 aa, synthetic construct
  REGION 1..247: note = 4D11 scFV
PQLQLQESGPGLLKPSETLSLTCTVSGGSISSPGYYGGWIRQPPGKGLEWIGSIYKSGSTYHNPSLKSRVTISVDTSKNQFSLKLSSVTAADTAVYYCTRPVVRYFGWFDPWGQGTLVTVSSASGGGGSGGGGSGGGGSAIQLTQSPSSLSASVGDRVTITCRASQGISSALAWYQQKPGKAPKLLIYDASNLESGVPSRFSGSGSGTDFTLTISSLQPEDFATYYCQQFNSYPTFGQGTKVEIKRT

SEQ ID NO: 687 - protein, 122 aa, synthetic construct
  REGION 1..122: note = 4D11
PQLQLQESGPGLLKPSETLSLTCTVSGGSISSPGYYGGWIRQPPGKGLEWIGSIYKSGSTYHNPSLKSRVTISVDTSKNQFSLKLSSVTAADTAVYYCTRPVVRYFGWFDPWGQGTLVTVSS

SEQ ID NO: 688 - protein, 108 aa, synthetic construct
  REGION 1..108: note = 4D11
AIQLTQSPSSLSASVGDRVTITCRASQGISSALAWYQQKPGKAPKLLIYDASNLESGVPSRFSGSGSGTDFTLTISSLQPEDFATYYCQQFNSYPTFGQGTKVEIKRT

SEQ ID NO: 689 - protein, 242 aa, synthetic construct
  REGION 1..242: note = A40C scFV
PQVQLVQSGAEVKKPGASVKVSCTASGFNIKDYYVHWVKQAPGQGLEWMGRIDPEDGDSKYAPKFQGKATMTADTSTSTVYMELSSLRSEDTAVYYCTTSYYVGTYGYWGQGTLVTVSSGGGGSGGGGSGGGGSDIQMTQSPSSLSASVGDRVTITCSASSSVSYMLWFQQKPGKAPKLLIYSTSNLASGVPSRFSGSGSGTDFTLTISSLQPEDFATYYCQQRTFYPYTFGGGTKVEIKRT

SEQ ID NO: 690 - protein, 119 aa, synthetic construct
  REGION 1..119: note = A40C
PQVQLVQSGAEVKKPGASVKVSCTASGFNIKDYYVHWVKQAPGQGLEWMGRIDPEDGDSKYAPKFQGKATMTADTSTSTVYMELSSLRSEDTAVYYCTTSYYVGTYGYWGQGTLVTVSS

SEQ ID NO: 691 - protein, 108 aa, synthetic construct
  REGION 1..108: note = A40C
DIQMTQSPSSLSASVGDRVTITCSASSSVSYMLWFQQKPGKAPKLLIYSTSNLASGVPSRFSGSGSGTDFTLTISSLQPEDFATYYCQQRTFYPYTFGGGTKVEIKRT

SEQ ID NO: 692 - protein, 250 aa, synthetic construct
  REGION 1..250: note = 119 scFV
PQVQLQQSGPGLVKPSQTLSLTCAISGDSVSSNSATWNWIRQSPSRDLEWLGRTYYRSKWYRDYVGSVKSRIIINPDTSNNQFSLQLNSVTPEDTAIYYCTRAQWLGGDYPYYYSMDVWGQGTTVTVSSGGGGSGGGGSGGGGSEIVLTQSPATLSLSPGERATLSCRASQSVSSYLAWYQQKPGQAPRLLIYDASNRATGIPARFSGSGSGTDFTLTISSLEPEDFAVYYCQQRSNTFGPGTKVDIKRT

SEQ ID NO: 693 - protein, 129 aa, synthetic construct
  REGION 1..129: note = 119
PQVQLQQSGPGLVKPSQTLSLTCAISGDSVSSNSATWNWIRQSPSRDLEWLGRTYYRSKWYRDYVGSVKSRIIINPDTSNNQFSLQLNSVTPEDTAIYYCTRAQWLGGDYPYYYSMDVWGQGTTVTVSS

SEQ ID NO: 694 - protein, 106 aa, synthetic construct
  REGION 1..106: note = 119
EIVLTQSPATLSLSPGERATLSCRASQSVSSYLAWYQQKPGQAPRLLIYDASNRATGIPARFSGSGSGTDFTLTISSLEPEDFAVYYCQQRSNTFGPGTKVDIKRT

SEQ ID NO: 695 - protein, 302 aa, synthetic construct
  REGION 1..302: note = 40L.28.40L.40L (CD40L-CD28-CD40L - CD40L)
MIETYNQTSPRSAATGLPISMKRSKRSRLLHSDYMNMTPRRPGPTRKHYQPYAPPRDFAAYRSIFMYLLTVFLITQMIGSALFAVYLHRRLDKIEDERNLHEDFVFMKTIQRCNTGERSLSLLNCEEIKSQFEGFVKDIMLNKEETKKENSFEMQKGDQNPQIAAHVISEASSKTTSVLQWAEKGYYTMSNNLVTLENGKQLTVKRQGLYYIYAQVTFCSNREASSQAPFIASLCLKSPGRFERILLRAANTHSSAKPCGQQSIHLGGVFELQPGASVFVNVTDPSQVSHGTGFTSFGLLKL

SEQ ID NO: 696 - protein, 440 aa, synthetic construct
  REGION 1..440: note = 1412-T4-CD40L-CD28 scFv (1412)- T4 -CD40L)
MALPVTALLLPLALLLHAARPQVQLVQSGAEVKKPGASVKVSCKASGYTFTSYYIHWVRQAPGQGLEWIGCIYPGNVNTNYNEKFKDRATLTVDTSISTAYMELSRLRSDDTAVYFCTRSHYGLDWNFDVWGQGTTVTVSSVEGGSGGSGGSGGSGGVMDDIQMTQSPSSLSASVGDRVTITCHASQNIYVWLNWYQQKPGKAPKLLIYKASNLHTGVPSRFSGSGSGTDFTLTISSLQPEDFATYYCQQGQTYPYTFGGGTKVEIKGYIPEAPRDGQAYVRKDGEWVLLSTFLGDQNPQIAAHVISEASSKTTSVLQWAEKGYYTMSNNLVTLENGKQLTVKRQGLYYIYAQVTFCSNREASSQAPFIASLCLKSPGRFERILLRAANTHSSAKPCGQQSIHLGGVFELQPGASVFVNVTDPSQVSHGTGFTSFGLLKL

SEQ ID NO: 697 - protein, 521 aa, synthetic construct
  REGION 1..521: note = 1412-F2.103 (-CD28/-CD40)
MALPVTALLLPLALLLHAARPQVQLVQSGAEVKKPGASVKVSCKASGYTFTSYYIHWVRQAPGQGLEWIGCIYPGNVNTNYNEKFKDRATLTVDTSISTAYMELSRLRSDDTAVYFCTRSHYGLDWNFDVWGQGTTVTVSSVEGGSGGSGGSGGSGGVMDDIQMTQSPSSLSASVGDRVTITCHASQNIYVWLNWYQQKPGKAPKLLIYKASNLHTGVPSRFSGSGSGTDFTLTISSLQPEDFATYYCQQGQTYPYTFGGGTKVEIKGGGGSEVQLVESGGGLVQPGGSLRLSCAVSGFTFSTYWMHWVRQAPGKGLVWVSRINSDGSSTTYADSVKGRFTISRDNAKNTLYLQMNSLRAEDTAVYYCARDRVLWIGELSYYGMDVWGQGTTVTVSSGGGGSGGGGSGGGGSDIQMTQSPSTLSASVGDRVTITCRASQSISNWLAWYQQKPGKAPKLLLYKASGLESGVPSRFSGSGSGTEFTLTINSLQPDDFATYYCQQSNSYSWTFGHGTKVEIKRT

SEQ ID NO: 698 - protein, 533 aa, synthetic construct
  REGION 1..533: note = 1412-F5.157 (-CD28/-CD40 )
MALPVTALLLPLALLLHAARPQVQLVQSGAEVKKPGASVKVSCKASGYTFTSYYIHWVRQAPGQGLEWIGCIYPGNVNTNYNEKFKDRATLTVDTSISTAYMELSRLRSDDTAVYFCTRSHYGLDWNFDVWGQGTTVTVSSVEGGSGGSGGSGGSGGVMDDIQMTQSPSSLSASVGDRVTITCHASQNIYVWLNWYQQKPGKAPKLLIYKASNLHTGVPSRFSGSGSGTDFTLTISSLQPEDFATYYCQQGQTYPYTFGGGTKVEIKGGGGSEVQLLESGGGLVQPGGSLRLSCAASGFAFSSYAMSWVRQAPGKGLEWVSAISGSGGSTYYADSVKGRFTISRDNSKNTLYLQMNSLRPRTRPYITVRKMGGTMVRGVMGTLTTGAREPWSPSPQGGGGSGGGGSGGGGSIQMTQSPSSVSASAGDRVTITCRASQGISSWLAWYQQKPGKAPKLLIYAGSSLQSGVPSRFSGSGFGTDFTLTIGSLQPEDFATYYCQQASSFPRTFGQGTKVEIKRTVLHHLSSSSRHLMS

SEQ ID NO: 699 - protein, 520 aa, synthetic construct
  REGION 1..520: note = 1412-F5.77 (-CD28/-CD40 )
MALPVTALLLPLALLLHAARPQVQLVQSGAEVKKPGASVKVSCKASGYTFTSYYIHWVRQAPGQGLEWIGCIYPGNVNTNYNEKFKDRATLTVDTSISTAYMELSRLRSDDTAVYFCTRSHYGLDWNFDVWGQGTTVTVSSVEGGSGGSGGSGGSGGVMDDIQMTQSPSSLSASVGDRVTITCHASQNIYVWLNWYQQKPGKAPKLLIYKASNLHTGVPSRFSGSGSGTDFTLTISSLQPEDFATYYCQQGQTYPYTFGGGTKVEIKGGGGSEVQLLESGGGLVQPGGSLRLSCAASGFTFSSYAMSWVRQAPGKGLEWVSAISGSGGSTYYADSVKGRFTISRDNSKNTLYLQMNSLRAEDTAVYYCAKDGGYYGSGSYGYFDYWGQGTLVTVSSGGGGSGGGGSGGGGSDIQMTQSPSSVSGSVGDRVTITCRASQGISSWLAWYQQKPGKAPKLLIYAGSSLQSGVPSRFSGSGFGTDFTLTISSLQPEDFATYYCQQASSFPRTFGQGTKVEIKRT

SEQ ID NO: 700 - protein, 385 aa, synthetic construct
  REGION 1..385: note = F2.103.CD28: (-CD40 scFv-CD28 )
MALPVTALLLPLALLLHAARPEVQLVESGGGLVQPGGSLRLSCAVSGFTFSTYWMHWVRQAPGKGLVWVSRINSDGSSTTYADSVKGRFTISRDNAKNTLYLQMNSLRAEDTAVYYCARDRVLWIGELSYYGMDVWGQGTTVTVSSGGGGSGGGGSGGGGSDIQMTQSPSTLSASVGDRVTITCRASQSISNWLAWYQQKPGKAPKLLLYKASGLESGVPSRFSGSGSGTEFTLTINSLQPDDFATYYCQQSNSYSWTFGHGTKVEIKRTASTTTPAPRPPTPAPTIASQPLSLRPEACRPAAGGAVHTRGLDFACDFWVLVVVGGVLACYSLLVTVAFIIFWVRSKRSRLLHSDYMNMTPRRPGPTRKHYQPYAPPRDFAAYRS

SEQ ID NO: 701 - protein, 397 aa, synthetic construct
  REGION 1..397: note = F5.157.CD28: (-CD40 scFv-CD28)
MALPVTALLLPLALLLHAARPEVQLLESGGGLVQPGGSLRLSCAASGFAFSSYAMSWVRQAPGKGLEWVSAISGSGGSTYYADSVKGRFTISRDNSKNTLYLQMNSLRPRTRPYITVRKMGGTMVRGVMGTLTTGAREPWSPSPQGGGGSGGGGSGGGGSIQMTQSPSSVSASAGDRVTITCRASQGISSWLAWYQQKPGKAPKLLIYAGSSLQSGVPSRFSGSGFGTDFTLTIGSLQPEDFATYYCQQASSFPRTFGQGTKVEIKRTVLHHLSSSSRHLMSASTTTPAPRPPTPAPTIASQPLSLRPEACRPAAGGAVHTRGLDFACDFWVLVVVGGVLACYSLLVTVAFIIFWVRSKRSRLLHSDYMNMTPRRPGPTRKHYQPYAPPRDFAAYRS

SEQ ID NO: 702 - protein, 384 aa, synthetic construct
  REGION 1..384: note = F5.77.CD28 (-CD40 scFv-CD28)
MALPVTALLLPLALLLHAARPEVQLLESGGGLVQPGGSLRLSCAASGFTFSSYAMSWVRQAPGKGLEWVSAISGSGGSTYYADSVKGRFTISRDNSKNTLYLQMNSLRAEDTAVYYCAKDGGYYGSGSYGYFDYWGQGTLVTVSSGGGGSGGGGSGGGGSDIQMTQSPSSVSGSVGDRVTITCRASQGISSWLAWYQQKPGKAPKLLIYAGSSLQSGVPSRFSGSGFGTDFTLTISSLQPEDFATYYCQQASSFPRTFGQGTKVEIKRTASTTTPAPRPPTPAPTIASQPLSLRPEACRPAAGGAVHTRGLDFACDFWVLVVVGGVLACYSLLVTVAFIIFWVRSKRSRLLHSDYMNMTPRRPGPTRKHYQPYAPPRDFAAYRS

SEQ ID NO: 703 - protein, 379 aa, synthetic construct
  REGION 1..379: note = F2.103.BB (-CD40 scFv-4-1BB)
MALPVTALLLPLALLLHAARPEVQLVESGGGLVQPGGSLRLSCAVSGFTFSTYWMHWVRQAPGKGLVWVSRINSDGSSTTYADSVKGRFTISRDNAKNTLYLQMNSLRAEDTAVYYCARDRVLWIGELSYYGMDVWGQGTTVTVSSGGGGSGGGGSGGGGSDIQMTQSPSTLSASVGDRVTITCRASQSISNWLAWYQQKPGKAPKLLLYKASGLESGVPSRFSGSGSGTEFTLTINSLQPDDFATYYCQQSNSYSWTFGHGTKVEIKRTTTTPAPRPPTPAPTIASQPLSLRPEACRPAAGGAVHTRGLDFACDIYIWAPLAGTCGVLLLSLVITLYCRGRKKLLYIFKQPFMRPVQTTQEEDGCSCRFPEEEEGGCE

SEQ ID NO: 704 - protein, 391 aa, synthetic construct
  REGION 1..391: note = F5.157.BB(-CD40 scFv-4-1BB)
MALPVTALLLPLALLLHAARPEVQLLESGGGLVQPGGSLRLSCAASGFAFSSYAMSWVRQAPGKGLEWVSAISGSGGSTYYADSVKGRFTISRDNSKNTLYLQMNSLRPRTRPYITVRKMGGTMVRGVMGTLTTGAREPWSPSPQGGGGSGGGGSGGGGSIQMTQSPSSVSASAGDRVTITCRASQGISSWLAWYQQKPGKAPKLLIYAGSSLQSGVPSRFSGSGFGTDFTLTIGSLQPEDFATYYCQQASSFPRTFGQGTKVEIKRTVLHHLSSSSRHLMSTTTPAPRPPTPAPTIASQPLSLRPEACRPAAGGAVHTRGLDFACDIYIWAPLAGTCGVLLLSLVITLYCRGRKKLLYIFKQPFMRPVQTTQEEDGCSCRFPEEEEGGCE

SEQ ID NO: 705 - protein, 378 aa, synthetic construct
  REGION 1..378: note = F5.77.BB(-CD40 scFv-4-1BB )
MALPVTALLLPLALLLHAARPEVQLLESGGGLVQPGGSLRLSCAASGFTFSSYAMSWVRQAPGKGLEWVSAISGSGGSTYYADSVKGRFTISRDNSKNTLYLQMNSLRAEDTAVYYCAKDGGYYGSGSYGYFDYWGQGTLVTVSSGGGGSGGGGSGGGGSDIQMTQSPSSVSGSVGDRVTITCRASQGISSWLAWYQQKPGKAPKLLIYAGSSLQSGVPSRFSGSGFGTDFTLTISSLQPEDFATYYCQQASSFPRTFGQGTKVEIKRTTTTPAPRPPTPAPTIASQPLSLRPEACRPAAGGAVHTRGLDFACDIYIWAPLAGTCGVLLLSLVITLYCRGRKKLLYIFKQPFMRPVQTTQEEDGCSCRFPEEEEGGCE

SEQ ID NO: 706 - protein, 382 aa, synthetic construct
  REGION 1..382: note = 4D11.CD28
MALPVTALLLPLALLLHAARPQLQLQESGPGLLKPSETLSLTCTVSGGSISSPGYYGGWIRQPPGKGLEWIGSIYKSGSTYHNPSLKSRVTISVDTSKNQFSLKLSSVTAADTAVYYCTRPVVRYFGWFDPWGQGTLVTVSSASGGGGSGGGGSGGGGSAIQLTQSPSSLSASVGDRVTITCRASQGISSALAWYQQKPGKAPKLLIYDASNLESGVPSRFSGSGSGTDFTLTISSLQPEDFATYYCQQFNSYPTFGQGTKVEIKRTASTTTPAPRPPTPAPTIASQPLSLRPEACRPAAGGAVHTRGLDFACDFWVLVVVGGVLACYSLLVTVAFIIFWVRSKRSRLLHSDYMNMTPRRPGPTRKHYQPYAPPRDFAAYRS

SEQ ID NO: 707 - protein, 377 aa, synthetic construct; identical to SEQ ID NO: 600
  REGION 1..377: note = A40C.CD28

SEQ ID NO: 708 - protein, 385 aa, synthetic construct
  REGION 1..385: note = 119.CD28
MALPVTALLLPLALLLHAARPQVQLQQSGPGLVKPSQTLSLTCAISGDSVSSNSATWNWIRQSPSRDLEWLGRTYYRSKWYRDYVGSVKSRIIINPDTSNNQFSLQLNSVTPEDTAIYYCTRAQWLGGDYPYYYSMDVWGQGTTVTVSSGGGGSGGGGSGGGGSEIVLTQSPATLSLSPGERATLSCRASQSVSSYLAWYQQKPGQAPRLLIYDASNRATGIPARFSGSGSGTDFTLTISSLEPEDFAVYYCQQRSNTFGPGTKVDIKRTASTTTPAPRPPTPAPTIASQPLSLRPEACRPAAGGAVHTRGLDFACDFWVLVVVGGVLACYSLLVTVAFIIFWVRSKRSRLLHSDYMNMTPRRPGPTRKHYQPYAPPRDFAAYRS

SEQ ID NO: 709 - protein, 489 aa, synthetic construct
  REGION 1..489: note = 4D5.BBZ (Her2 CAR)
MDFQVQIFSFLLISASVIMSRGDIQMTQSPSSLSASVGDRVTITCRASQDVNTAVAWYQQKPGKAPKLLIYSASFLYSGVPSRFSGSRSGTDFTLTISSLQPEDFATYYCQQHYTTPPTFGQGTKVEIKRTGSTSGSGKPGSGEGSEVQLVESGGGLVQPGGSLRLSCAASGFNIKDTYIHWVRQAPGKGLEWVARIYPTNGYTRYADSVKGRFTISADTSKNTAYLQMNSLRAEDTAVYYCSRWGGDGFYAMDVWGQGTLVTVSSTTTPAPRPPTPAPTIASQPLSLRPEACRPAAGGAVHTRGLDFACDIYIWAPLAGTCGVLLLSLVITLYCKRGRKKLLYIFKQPFMRPVQTTQEEDGCSCRFPEEEEGGCELRVKFSRSADAPAYKQGQNQLYNELNLGRREEYDVLDKRRGRDPEMGGKPRRKNPQEGLYNELQKDKMAEAYSEIGMKGERRRGKGHDGLYQGLSTATKDTYDALHMQALPPR

SEQ ID NO: 710 - protein, 486 aa, synthetic construct
  REGION 1..486: note = FMC63.BBZ (CD19 CAR)
MALPVTALLLPLALLLHAARPDIQMTQTTSSLSASLGDRVTISCRASQDISKYLNWYQQKPDGTVKLLIYHTSRLHSGVPSRFSGSGSGTDYSLTISNLEQEDIATYFCQQGNTLPYTFGGGTKLEITGGGGSGGGGSGGGGSEVKLQESGPGLVAPSQSLSVTCTVSGVSLPDYGVSWIRQPPRKGLEWLGVIWGSETTYYNSALKSRLTIIKDNSKSQVFLKMNSLQTDDTAIYYCAKHYYYGGSYAMDYWGQGTSVTVSSTTTPAPRPPTPAPTIASQPLSLRPEACRPAAGGAVHTRGLDFACDIYIWAPLAGTCGVLLLSLVITLYCKRGRKKLLYIFKQPFMRPVQTTQEEDGCSCRFPEEEEGGCELRVKFSRSADAPAYKQGQNQLYNELNLGRREEYDVLDKRRGRDPEMGGKPRRKNPQEGLYNELQKDKMAEAYSEIGMKGERRRGKGHDGLYQGLSTATKDTYDALHMQALPPR

SEQ ID NO: 711 - protein, 488 aa, synthetic construct
  REGION 1..488: note = ss1.BBZ ( CAR)
MALPVTALLLPLALLLHAARPGSQVQLQQSGPELEKPGASVKISCKASGYSFTGYTMNWVKQSHGKSLEWIGLITPYNGASSYNQKFRGKATLTVDKSSSTAYMDLLSLTSEDSAVYFCARGGYDGRGFDYWGQGTTVTVSSGGGGSGGGGSSGGGSDIELTQSPAIMSASPGEKVTMTCSASSSVSYMHWYQQKSGTSPKRWIYDTSKLASGVPGRFSGSGSGNSYSLTISSVEAEDDATYYCQQWSKHPLTYGAGTKLEIKASTTTPAPRPPTPAPTIASQPLSLRPEACRPAAGGAVHTRGLDFACDIYIWAPLAGTCGVLLLSLVITLYCKRGRKKLLYIFKQPFMRPVQTTQEEDGCSCRFPEEEEGGCELRVKFSRSADAPAYKQGQNQLYNELNLGRREEYDVLDKRRGRDPEMGGKPRRKNPQEGLYNELQKDKMAEAYSEIGMKGERRRGKGHDGLYQGLSTATKDTYDALHMQALPPR

SEQ ID NO: 712 - protein, 461 aa, synthetic construct
  REGION 1..461: note = J591.BBZ (PSMA CAR)
MTQSHKFMSTSVGDRVSIICKASQDVGTAVDWYQQKPGQSPKLLIYWASTRHTGVPDRFTGSGSGTDFTLTITNVQSEDLADYFCQQYNSYPLTFGAGTMLDLKGGGGSGGGGSSGGGSEVQLQQSGPELVKPGTSVRISCKTSGYTFTEYTIHWVKQSHGKSLEWIGNINPNNGGTTYNQKFEDKATLTVDKSSSTAYMELRSLTSEDSAVYYCAAGWNFDYWGQGTTLTVSSASSGTTTPAPRPPTPAPTIASQPLSLRPEACRPAAGGAVHTRGLDFACDIYIWAPLAGTCGVLLLSLVITLYCKRGRKKLLYIFKQPFMRPVQTTQEEDGCSCRFPEEEEGGCELRVKFSRSADAPAYKQGQNQLYNELNLGRREEYDVLDKRRGRDPEMGGKPRRKNPQEGLYNELQKDKMAEAYSEIGMKGERRRGKGHDGLYQGLSTATKDTYDALHMQALPPR

SEQ ID NO: 713 - protein, 532 aa, synthetic construct
  REGION 1..532: note = c-Met CAR
MALPVTALLLPLALLLHAARPGSDIQMTQSPSSVSASVGDRVTITCRASQGINTWLAWYQQKPGKAPKLLIYAASSLKSGVPSRFSGSGSGADFTLTISSLQPEDFATYYCQQANSFPLTFGGGTKVEIKGSTSGSGKPGSGEGSTKGQVQLVQSGAEVKKPGASVKVSCEASGYTFTSYGFSWVRQAPGQGLEWMGWISASNGNTYYAQKLQGRVTMTTDTSTSSAYMELRSLRSDDTAVYYCARVYADYADYWGQGTLVTVASTTTPAPRPPTPAPTIASQPLSLRPEACRPAAGGAVHTRGLDFACDFWVLVVVGGVLACYSLLVTVAFIIFWVRSKRSRLLHSDYMNMTPRRPGPTRKHYQPYAPPRDFAAYRSKRGRKKLLYIFKQPFMRPVQTTQEEDGCSCRFPEEEEGGCELRVKFSRSADAPAYKQGQNQLYNELNLGRREEYDVLDKRRGRDPEMGGKPRRKNPQEGLYNELQKDKMAEAYSEIGMKGERRRGKGHDGLYQGLSTATKDTYDALHMQALPPR

SEQ ID NO: 714 - protein, 483 aa, synthetic construct
  REGION 1..483: note = BCMA CAR
MALPVTALLLPLALLLHAARPEVQLVESGGGLVQPGGSLRLSCAVSGFALSNHGMSWVRRAPGKGLEWVSGIVYSGSTYYAASVKGRFTISRDNSRNTLYLQMNSLRPEDTAIYYCSAHGGESDVWGQGTTVTVSSASGGGGSGGRASGGGGSDIQLTQSPSSLSASVGDRVTITCRASQSISSYLNWYQQKPGKAPKLLIYAASSLQSGVPSRFSGSGSGTDFTLTISSLQPEDFATYYCQQSYSTPYTFGQGTKVEIKTTTPAPRPPTPAPTIASQPLSLRPEACRPAAGGAVHTRGLDFACDIYIWAPLAGTCGVLLLSLVITLYCKRGRKKLLYIFKQPFMRPVQTTQEEDGCSCRFPEEEEGGCELRVKFSRSADAPAYKQGQNQLYNELNLGRREEYDVLDKRRGRDPEMGGKPRRKNPQEGLYNELQKDKMAEAYSEIGMKGERRRGKGHDGLYQGLSTATKDTYDALHMQALPPR

SEQ ID NO: 715 - protein, 364 aa, synthetic construct
  REGION 1..364: note = FHVH33.BBZ (BCMA CAR)
MALPVTALLLPLALLLHAARPEVQLLESGGGLVQPGGSLRLSCAASGFTFSSYAMSWVRQAPGKGLEWVSSISGSGDYIYYADSVKGRFTISRDISKNTLYLQMNSLRAEDTAVYYCAKEGTGANSSLADYRGQGTLVTVSSTTTPAPRPPTPAPTIASQPLSLRPEACRPAAGGAVHTRGLDFACDIYIWAPLAGTCGVLLLSLVITLYCRGRKKLLYIFKQPFMRPVQTTQEEDGCSCRFPEEEEGGCELRVKFSRSADAPAYKQGQNQLYNELNLGRREEYDVLDKRRGRDPEMGGKPRRKNPQEGLYNELQKDKMAEAYSEIGMKGERRRGKGHDGLYQGLSTATKDTYDALHMQALPPR

SEQ ID NO: 716 - protein, 488 aa, synthetic construct
  REGION 1..488: note = BCMA338.BBZ (BCMA CAR)
MALPVTALLLPLALLLHAARPQVKLEESGGGLVQAGRSLRLSCAASEHTFSSHVMGWFRQAPGKERESVAVIGWRDISTSYADSVKGRFTISRDNAKKTLYLQMNSLKPEDTAVYYCAARRIDAADFDSWGQGTQVTVSSGGGGSEVQLVESGGGLVQAGGSLRLSCAASGRTFTMGWFRQAPGKEREFVAAISLSPTLAYYAESVKGRFTISRDNAKNTVVLQMNSLKPEDTALYYCAADRKSVMSIRPDYWGQGTQVTVSSTSTTTPAPRPPTPAPTIASQPLSLRPEACRPAAGGAVHTRGLDFACDIYIWAPLAGTCGVLLLSLVITLYCKRGRKKLLYIFKQPFMRPVQTTQEEDGCSCRFPEEEEGGCELRVKFSRSADAPAYQQGQNQLYNELNLGRREEYDVLDKRRGRDPEMGGKPRRKNPQEGLYNELQKDKMAEAYSEIGMKGERRRGKGHDGLYQGLSTATKDTYDALHMQALPPR

SEQ ID NO: 717 - protein, 486 aa, synthetic construct
  REGION 1..486: note = G33.BBZ (GPC3 CAR)
MALPVTALLLPLALLLHAARPQVQLQQSGAELVRPGASVKLSCKASGYTFTDYEMHWVKQTPVHGLKWIGALDPKTGDTAYSQKFKGKATLTADKSSSTAYMELRSLTSEDSAVYYCTRFYSYTYWGQGTLVTVSAGGGGSGGGGSGGGGSDVVMTQTPLSLPVSLGDQASISCRSSQSLVHSNGNTYLHWYLQKPGQSPKLLIYKVSNRFSGVPDRFSGSGSGTDFTLKISRVEAEDLGVYFCSQNTHVPPTFGSGTKLEIKTTTPAPRPPTPAPTIASQPLSLRPEACRPAAGGAVHTRGLDFACDIYIWAPLAGTCGVLLLSLVITLYCKRGRKKLLYIFKQPFMRPVQTTQEEDGCSCRFPEEEEGGCELRVKFSRSADAPAYKQGQNQLYNELNLGRREEYDVLDKRRGRDPEMGGKPRRKNPQEGLYNELQKDKMAEAYSEIGMKGERRRGKGHDGLYQGLSTATKDTYDALHMQALPPR

SEQ ID NO: 718 - protein, 889 aa, synthetic construct
  REGION 1..889: note = IL13(EQ).BBZ (IL13ra2 car)
MLLLVTSLLLCELPHPAFLLIPGPVPPSTALRYLIEELVNITQNQKAPLCNGSMVWSINLTAGMYCAALESLINVSGCSAIEKTQRMLSGFCPHKVSAGQFSSLHVRDTKIEVAQFVKDLLLHLKKLFREGRFNESKYGPPCPPCPAPEFEGGPSVFLFPPKPKDTLMISRTPEVTCVVVDVSQEDPEVQFNWYVDGVEVHNAKTKPREEQFQSTYRVVSVLTVLHQDWLNGKEYKCKVSNKGLPSSIEKTISKAKGQPREPQVYTLPPSQEEMTKNQVSLTCLVKGFYPSDIAVEWESNGQPENNYKTTPPVLDSDGSFFLYSRLTVDKSRWQEGNVFSCSVMHEALHNHYTQKSLSLSLGKMALIVLGGVAGLLLFIGLGIFFKRGRKKLLYIFKQPFMRPVQTTQEEDGCSCRFPEEEEGGCELGGGRVKFSRSADAPAYQQGQNQLYNELNLGRREEYDVLDKRRGRDPEMGGKPRRKNPQEGLYNELQKDKMAEAYSEIGMKGERRRGKGHDGLYQGLSTATKDTYDALHMQALPPRLEGGGEGRGSLLTCGDVEENPGPRMPPPRLLFFLLFLTPMEVRPEEPLVVKVEEGDNAVLQCLKGTSDGPTQQLTWSRESPLKPFLKLSLGLPGLGIHMRPLAIWLFIFNVSQQMGGFYLCQPGPPSEKAWQPGWTVNVEGSGELFRWNVSDLGGLGCGLKNRSSEGPSSPSGKLMSPKLYVWAKDRPEIWEGEPPCVPPRDSLNQSLSQDLTMAPGSTLWLSCGVPPDSVSRGPLSWTHVHPKGPKSLLSLELKDDRPARDMWVMETGLLLPRATAQDAGKYYCHRGNLTMSFHLEITARPVLWHWLLRTGGWKVSAVTLAYLIFCLCSLVGILHLQRALVLRRKR

SEQ ID NO: 719 - protein, 479 aa, synthetic construct
  REGION 1..479: note = C10.BBZ (EGFR CAR)
MGWSCIILFLVATATGVHSDYKDDDDKEVQLVQSGAEVKKPGSSVKVSCKASGGTFSSYAISWVRQAPGQGLEWMGGIIPIFGTANYAQKFQGRVTITADESTSTAYMELSSLRSEDTAVYYCAREEGPYCSSTSCYGAFDIWGQGTLVTVSSGGGGSGGGGSGGGGSQSVLTQDPAVSVALGQTVKITCQGDSLRSYFASWYQQKPGQAPTLVMYARNDRPAGVPDRFSGSKSGTSASLAISGLQSEDEADYYCAAWDDSLNGYLFGAGTKLTVLGRVTVSSAEPKSCDKTHTCPPCPGSIYIWAPLAGTCGVLLLSLVITLYCKRGRKKLLYIFKQPFMRPVQTTQEEDGCSCRFPEEEEGGCELRVKFSRSADAPAYQQGQNQLYNELNLGRREEYDVLDKRRGRDPEMGGKPRRKNPQEGLYNELQKDKMAEAYSEIGMKGERRRGKGHDGLYQGLSTATKDTYDALHMQALPPR

SEQ ID NO: 720 - protein, 333 aa, synthetic construct
  REGION 1..333: note = 7G3L.BBZ (CD123 CAR)
MTQSPDSLAVSLGERATINCKSSQSLLNSGNQKNYLTWYLQKPGQPPKLLIYWASTRESGVPDRFSGSGSGTDFTLTISSLQAEDVAVYYCQNDYSYPYTFGQGTKLEIKRTTTPAPRPPTPAPTIASQPLSLRPEACRPAAGGAVHTRGLDFACDIYIWAPLAGTCGVLLLSLVITLYCRGRKKLLYIFKQPFMRPVQTTQEEDGCSCRFPEEEEGGCELRVKFSRSADAPAYKQGQNQLYNELNLGRREEYDVLDKRRGRDPEMGGKPRRKNPQEGLYNELQKDKMAEAYSEIGMKGERRRGKGHDGLYQGLSTATKDTYDALHMQALPPR

SEQ ID NO: 721 - protein, 508 aa, synthetic construct
  REGION 1..508: note = 3A1e.BBZ (CD7 CAR)
MLEVKQTLNFDLLKLAGDVESNPGPMALPVTALLLPLALLLHAARPQVKLQESGGGLVKPGGSLKLSCAASGFTFSSYAMSWVRQTPEKRLEWVATISSGGSYTYYPDSVKGRFTISRDNAKNTLYLQMSSLRSEDTAMYYCARQDGYYPGWFANWGQGTTVTVSSGGGGSGGGGSGGGGSDIELTQSPAIMSASLGEEITLTCSASSSVSYMHWYQQKSGTSPKLLIYSTSNLASGVPSRFSGSGSGTFYSLTISSVEAEDAADYYCHQWSSYTFGGGTKLEIKRTTTPAPRPPTPAPTIASQPLSLRPEACRPAAGGAVHTRGLDFACDIYIWAPLAGTCGVLLLSLVITLYCRGRKKLLYIFKQPFMRPVQTTQEEDGCSCRFPEEEEGGCELRVKFSRSADAPAYKQGQNQLYNELNLGRREEYDVLDKRRGRDPEMGGKPRRKNPQEGLYNELQKDKMAEAYSEIGMKGERRRGKGHDGLYQGLSTATKDTYDALHMQALPPR

SEQ ID NO: 722 - protein, 507 aa, synthetic construct
  REGION 1..507: note = 14.g2a.BBZ (GD2 CAR)
MEFGLSWLFLVAILKGVQCSRDILLTQTPLSLPVSLGDQASISCRSSQSLVHRNGNTYLHWYLQKPGQSPKLLIHKVSNRFSGVPDRFSGSGSGTDFTLKISRVEAEDLGVYFCSQSTHVPPLTFGAGTKLELKRADAAPTVSIFPGSGGGGSGGEVKLQQSGPSLVEPGASVMISCKASGSSFTGYNMNWVRQNIGKSLEWIGAIDPYYGGTSYNQKFKGRATLTVDKSSSTAYMHLKSLTSEDSAVYYCVSGMEYWGQGTSVTVSSAKTTPPSVYGRVTVSSTTTPAPRPPTPAPTIASQPLSLRPEACRPAAGGAVHTRGLDFACDIYIWAPLAGTCGVLLLSLVITLYCKRGRKKLLYIFKQPFMRPVQTTQEEDGCSCRFPEEEEGGCELRVKFSRSADAPAYKQGQNQLYNELNLGRREEYDVLDKRRGRDPEMGGKPRRKNPQEGLYNELQKDKMAEAYSEIGMKGERRRGKGHDGLYQGLSTATKDTYDALHMQALPPR

SEQ ID NO: 723 - protein, 483 aa, synthetic construct
  REGION 1..483: note = 2B3.BBZ (PSCA CAR)
MALPVTALLLPLALLLHAARPDIQLTQSPSSLSASVGDRVTITCSASSSVRFIHWYQQKPGKAPKRLIYDTSKLASGVPSRFSGSGSGTDFTLTISSLQPEDFATYYCQQWSSSPFTFGQGTKVEIKGSTSGGGSGGGSGGGGSSEVQLVESGGGLVQPGGSLRLSCAASGFNIKDYYIHWVRQAPGKGLEWVAWIDPENGDTEFVPKFQGRATISADTSKNTAYLQMNSLRAEDTAVYYCKTGGFWGQGTLVTVSSAAGTTTPAPRPPTPAPTIASQPLSLRPEACRPAAGGAVHTRGLDFACDIYIWAPLAGTCGVLLLSLVITLYCKRGRKKLLYIFKQPFMRPVQTTQEEDGCSCRFPEEEEGGCELRVKFSRSADAPAYKQGQNQLYNELNLGRREEYDVLDKRRGRDPEMGGKPRRKNPQEGLYNELQKDKMAEAYSEIGMKGERRRGKGHDGLYQGLSTATKDTYDALHMQALPPR

SEQ ID NO: 724 - protein, 270 aa, synthetic construct
  REGION 1..270: note = NY-ESO-1 TCR alpha
METLLGVSLVILWLQLARVNSQQGEEDPQALSIQEGENATMNCSYKTSINNLQWYRQNSGRGLVHLILIRSNEREKHSGRLRVTLDTSKKSSSLLITASRAADTASYFCATDGAGKSTFGDGTTLTVKPNIQKPDPAVYQLRDSKSSDKSVCLFTDFDSQTNVSQSKDSDVYITDKTVLDMRSMDFKSNSAVAWSNKSDFACANAFNNSIIPADTFFPSPESSCDVKLVEKSFETDTNLNFQNLSVIGFRILLLKVAGFNLLMTLRLWSS

SEQ ID NO: 725 - protein, 308 aa, synthetic construct
  REGION 1..308: note = NY-ESO-1 TCR beta
MDSWTLCCVSLCILVAKHTDAGVIQSPRHEVTEMGQEVTLRCKPISGHDYLFWYRQTMMRGLELLIYFNNNVPIDDSGMPEDRFSAKMPNASFSTLKIQPSEPRDSAVYFCASTIGAQPQHFGDGTRLSILEDLNKVFPPEVAVFEPSEAEISHTQKATLVCLATGFFPDHVELSWWVNGKEVHSGVSTDPQPLKEQPALNDSRYCLSSRLRVSATFWQNPRNHFRCQVQFYGLSENDEWTQDRAKPVTQIVSAEAWGRADCGFTSVSYQQGVLSATILYEILLGKATLYAVLVSALVLMAMVKRKDF

SEQ ID NO: 726 - protein, 603 aa, synthetic construct
  REGION 1..603: note = EBV16-E7 TCR
MWGVFLLYVSMKMGGTTGQNIDQPTEMTATEGAIVQINCTYQTSGFNGLFWYQQHAGEAPTFLSYNVLDGLEEKGRFSSFLSRSKGYSYLLLKELQMKDSASYLCASVDGNNRLAFGKGNQVVVIPNIQNPDPAVYQLRDSKSSDKSVCLFTDFDSQTNVSQSKDSDVYITDKCVLDMRSMDFKSNSAVAWSNKSDFACANAFNNSIIPEDTFFPSPESSCDVKLVEKSFETDTNLNFQNLSVIGFRILLLKVAGFNLLMTLRLWSSRAKREGRGSLLTCGDVEENPGPMGPGLLCWALLCLLGAGLVDAGVTQSPTHLIKTRGQQVTLRCSPKSGHDTVSWYQQALGQGPQFIFQYYEEEERQRGNFPDRFSGHQFPNYSSELNVNALLLGDSALYLCASSLGWRGGRYNEQFFGPGTRLTVLEDLKNVFPPEVAVFEPSEAEISHTQKATLVCLATGFYPDHVELSWWVNGKEVHSGVCTDPQPLKEQPALNDSRYCLSSRLRVSATFWQNPRNHFRCQVQFYGLSENDEWTQDRAKPVTQIVSAEAWGRADCGFTSESYQQGVLSATILYEILLGKATLYAVLVSALVLMAMVKRKDSRG

SEQ ID NO: 727 - protein, 267 aa, synthetic construct
  REGION 1..267: note = EBV16-E7 TCR alpha
MWGVFLLYVSMKMGGTTGQNIDQPTEMTATEGAIVQINCTYQTSGFNGLFWYQQHAGEAPTFLSYNVLDGLEEKGRFSSFLSRSKGYSYLLLKELQMKDSASYLCASVDGNNRLAFGKGNQVVVIPNIQNPDPAVYQLRDSKSSDKSVCLFTDFDSQTNVSQSKDSDVYITDKCVLDMRSMDFKSNSAVAWSNKSDFACANAFNNSIIPEDTFFPSPESSCDVKLVEKSFETDTNLNFQNLSVIGFRILLLKVAGFNLLMTLRLWSS

SEQ ID NO: 728 - protein, 314 aa, synthetic construct
  REGION 1..314: note = EBV16-E7 TCR beta
MGPGLLCWALLCLLGAGLVDAGVTQSPTHLIKTRGQQVTLRCSPKSGHDTVSWYQQALGQGPQFIFQYYEEEERQRGNFPDRFSGHQFPNYSSELNVNALLLGDSALYLCASSLGWRGGRYNEQFFGPGTRLTVLEDLKNVFPPEVAVFEPSEAEISHTQKATLVCLATGFYPDHVELSWWVNGKEVHSGVCTDPQPLKEQPALNDSRYCLSSRLRVSATFWQNPRNHFRCQVQFYGLSENDEWTQDRAKPVTQIVSAEAWGRADCGFTSESYQQGVLSATILYEILLGKATLYAVLVSALVLMAMVKRKDSRG

SEQ ID NO: 729 - protein, 606 aa, synthetic construct
  REGION 1..606: note = H3.3K27M TCR
MLTASLLRAVIASICVVSSMAQKVTQAQTEISVVEKEDVTLDCVYETRDTTYYLFWYKQPPSGELVFLIRRNSFDEQNEISGRYSWNFQKSTSSFNFTITASQVVDSAVYFCALSEENDMRFGAGTRLTVKPNIQNPDPAVYQLRDSKSSDKSVCLFTDFDSQTNVSQSKDSDVYITDKTVLDMRSMDFKSNSAVAWSNKSDFACANAFNNSIIPEDTFFPSPESSCDVKLVEKSFETDTNLNFQNLSVIGFRILLLKVAGFNLLMTLRLWSSVKQTLNFDLLKLAGDVESNPGPMGPQLLGYVVLCLLGAGPLEAQVTQNPRYLITVTGKKLTVTCSQNMNHEYMSWYRQDPGLGLRQIYYSMNVEVTDKGDVPEGYKVSRKEKRNFPLILESPNPNQTSLYFCASGWGGPFYEQYFGPGTRLTVTEDLKNVFPPEVAVFEPSEAEISHTQKATLVCLATGFYPDHVELSWWVNGKEVHSGVSTDPQPLKEQPALNDSRYCLSSRLRVSATFWQNPRNHFRCQVQFYGLSENDEWTQDRAKPVTQIVSAEAWGRADCGFTSESYQQGVLSATILYEILLGKATLYAVLVSALVLMAMVKRKDSRG

SEQ ID NO: 730 - protein, 273 aa, synthetic construct
  REGION 1..273: note = H3.3K27M TCR alpha
MLTASLLRAVIASICVVSSMAQKVTQAQTEISVVEKEDVTLDCVYETRDTTYYLFWYKQPPSGELVFLIRRNSFDEQNEISGRYSWNFQKSTSSFNFTITASQVVDSAVYFCALSEENDMRFGAGTRLTVKPNIQNPDPAVYQLRDSKSSDKSVCLFTDFDSQTNVSQSKDSDVYITDKTVLDMRSMDFKSNSAVAWSNKSDFACANAFNNSIIPEDTFFPSPESSCDVKLVEKSFETDTNLNFQNLSVIGFRILLLKVAGFNLLMTLRLWSS

SEQ ID NO: 731 - protein, 311 aa, synthetic construct
  REGION 1..311: note = H3.3K27M TCR beta
MGPQLLGYVVLCLLGAGPLEAQVTQNPRYLITVTGKKLTVTCSQNMNHEYMSWYRQDPGLGLRQIYYSMNVEVTDKGDVPEGYKVSRKEKRNFPLILESPNPNQTSLYFCASGWGGPFYEQYFGPGTRLTVTEDLKNVFPPEVAVFEPSEAEISHTQKATLVCLATGFYPDHVELSWWVNGKEVHSGVSTDPQPLKEQPALNDSRYCLSSRLRVSATFWQNPRNHFRCQVQFYGLSENDEWTQDRAKPVTQIVSAEAWGRADCGFTSESYQQGVLSATILYEILLGKATLYAVLVSALVLMAMVKRKDSRG

SEQ ID NO: 732 - protein, 533 aa, synthetic construct
  REGION 1..533: note = CD19-CD3 BiTE
MGWSCIILFLVATATGVHSDYKDDDDKDIQLTQSPASLAVSLGQRATISCKASQSVDYDGDSYLNWYQQIPGQPPKLLIYDASNLVSGIPPRFSGSGSGTDFTLNIHPVEKVDAATYHCQQSTEDPWTFGGGTKLEIKGGGGSGGGGSGGGGSQVQLQQSGAELVRPGSSVKISCKASGYAFSSYWMNWVKQRPGQGLEWIGQIWPGDGDTNYNGKFKGKATLTADESSSTAYMQLSSLASEDSAVYFCARRETTTVGRYYYAMDYWGQGTTVTVSSGGGGSDIKLQQSGAELARPGASVKMSCKTSGYTFTRYTMHWVKQRPGQGLEWIGYINPSRGYTNYNQKFKDKATLTTDKSSSTAYMQLSSLTSEDSAVYFCARYYDDHYCLDYWGQGTTLTVSSVEGGSGGSGGSGGSGGVDDAAIQLTQSPAIMSASPGEKVTMTCRASSSVSYMNWYQQKSGTSPKRWIYDTSKVASGVPYRFSGSGSGTSYSLTISSMEAEDAATYYCQQWSSNPLTFGAGTKLELKHHHHHH

SEQ ID NO: 733 - protein, 521 aa, synthetic construct
  REGION 1..521: note = 139-CD3 (EGFRvIII BiTE)
MGWSCIILFLVATATGVHSDYKDDDDKDIQMTQSPSSLSASVGDRVTITCRASQGIRNNLAWYQQKPGKAPKRLIYAASNLQSGVPSRFTGSGSGTEFTLIVSSLQPEDFATYYCLQHHSYPLTSGGGTKVEIKGGGGSGGGGSGGGGSEVQVLESGGGLVQPGGSLRLSCAASGFTFSSYAMSWVRQAPGKGLEWVSAISGSGGSTNYADSVKGRFTISRDNSKNTLYLQMNSLRAEDTAVYYCAGSSGWSEYWGQGTLVTVSSGGGGSDIKLQQSGAELARPGASVKMSCKTSGYTFTRYTMHWVKQRPGQGLEWIGYINPSRGYTNYNQKFKDKATLTTDKSSSTAYMQLSSLTSEDSAVYYCARYYDDHYCLDYWGQGTTLTVSSVEGGSGGSGGSGGSGGVDDAAIQLTQSPAIMSASPGEKVTMTCRASSSVSYMNWYQQKSGTSPKRWIYDTSKVASGVPYRFSGSGSGTSYSLTISSMEAEDAATYYCQQWSSNPLTFGAGTKLELKHHHHHH

SEQ ID NO: 734 - DNA, 909 bp, synthetic construct
  misc_feature 1..909: note = 40L.28.40L.40L
  source 1..909: mol_type = other DNA
atgatcgaaacatacaaccaaacttctccccgatctgcggccactggactgcccatcagcatgaaaaggagtaagaggagcaggctcctgcacagtgactacatgaacatgactccccgccgccccgggcccacccgcaagcattaccagccctatgccccaccacgcgacttcgcagcctatcgctccatttttatgtatttacttactgtttttcttatcacccagatgattgggtcagcactttttgctgtgtatcttcatagaaggttggacaagatagaagatgaaaggaatcttcatgaagattttgtattcatgaaaacgatacagagatgcaacacaggagaaagatccttatccttactgaactgtgaggagattaaaagccagtttgaaggctttgtgaaggatataatgttaaacaaagaggagacgaagaaagaaaacagctttgaaatgcaaaaaggtgatcagaatcctcaaattgcggcacatgtcataagtgaggccagcagtaaaacaacatctgtgttacagtgggctgaaaaaggatactacaccatgagcaacaacttggtaaccctggaaaatgggaaacagctgaccgttaaaagacaaggactctattatatctatgcccaagtcaccttctgttccaatcgggaagcttcgagtcaagctccatttatagccagcctctgcctaaagtcccccggtagattcgagagaatcttactcagagctgcaaatacccacagttccgccaaaccttgcgggcaacaatccattcacttgggaggagtatttgaattgcaaccaggtgcttcggtgtttgtcaatgtgactgatccaagccaagtgagccatggcactggcttcacgtcctttggcttactcaaactctga

SEQ ID NO: 735 - DNA, 1328 bp, synthetic construct
  misc_feature 1..1328: note = 1412-T4-CD40L
  source 1..1328: mol_type = other DNA
atggccctccccgtgacggcactgctgctacctctggcactgctgctgcacgccgcgcgtccccaggtgcagctggtgcagtccggagccgaggtaaagaagccaggcgcttccgtcaaggtgtcatgcaaggcctcaggctacaccttcacaagctattacatccactgggtgcgccaagctcccggtcagggcttggagtggatcgggtgcatttacccagggaacgtcaacacaaactacaacgagaagttcaaggatcgggcaaccctgaccgtggacacatccatctctaccgcctacatggagctgtcacgcctgcgctctgatgacaccgcagtgtacttctgtaccaggagtcactacggcctggactggaactttgatgtctggggccagggaaccaccgtgacggtgtccagtgtggagggcggtagtggcggctctggtgggtccggaggctcaggcggcgtgatggatgacattcagatgacccagagtccctcctccctctccgcttccgtcggagaccgcgtgaccatcacttgtcacgcctcacagaatatctacgtgtggctgaactggtaccaacagaagcccggcaaggcccccaagctgcttatctataaagcgtccaacctccacacgggagtcccttcccgcttctccggatccggcagtgggacggacttcacactcacaatctcgtcgctgcagccagaggactttgcgacgtactactgccagcagggccagacctacccatatactttcggcggcgggaccaaggtggagattaagggatacatccccgaggccccgcgcgacgggcaggcatacgtgaggaaagacggtgagtgggtcctgctgagcacctttctcggtgatcagaatcctcaaattgcggcacatgtcataagtgaggccagcagtaaaacaacatctgtgttacagtgggctgaaaaaggatactacaccatgagcaacaacttggtaaccctggaaaatgggaaacagctgaccgttaaaagacaaggactctattatatctatgcccaagtcaccttctgttccaatcgggaagcttcgagtcaagctccatttatagccagcctctgcctaaagtcccccggtagattcgagagaatcttactcagagctgcaaatacccacagttccgccaaaccttgcgggcaacaatccattcacttgggaggagtatttgaattgcaaccaggtgcttcggtgtttgtcaatgtgactgatccaagccaagtgagccatggcactggcttcacgtcctttggcttactcaaactctgagtcga

SEQ ID NO: 736 - DNA, 1566 bp, synthetic construct
  misc_feature 1..1566: note = 1412-F2.103
  source 1..1566: mol_type = other DNA
atggccctccccgtgacggcactgctgctacctctggcactgctgctgcacgccgcgcgtccccaggtgcagctggtgcagtccggagccgaggtaaagaagccaggcgcttccgtcaaggtgtcatgcaaggcctcaggctacaccttcacaagctattacatccactgggtgcgccaagctcccggtcagggcttggagtggatcgggtgcatttacccagggaacgtcaacacaaactacaacgagaagttcaaggatcgggcaaccctgaccgtggacacatccatctctaccgcctacatggagctgtcacgcctgcgctctgatgacaccgcagtgtacttctgtaccaggagtcactacggcctggactggaactttgatgtctggggccagggaaccaccgtgacggtgtccagtgtggagggcggtagtggcggctctggtgggtccggaggctcaggcggcgtgatggatgacattcagatgacccagagtccctcctccctctccgcttccgtcggagaccgcgtgaccatcacttgtcacgcctcacagaatatctacgtgtggctgaactggtaccaacagaagcccggcaaggcccccaagctgcttatctataaagcgtccaacctccacacgggagtcccttcccgcttctccggatccggcagtgggacggacttcacactcacaatctcgtcgctgcagccagaggactttgcgacgtactactgccagcagggccagacctacccatatactttcggcggcgggaccaaggtggagattaagggaggtggtggatccgaggtgcagctggtggagtccgggggaggcttagttcagcctggggggtccctgagactctcctgtgcagtctctggattcaccttcagtacctactggatgcactgggtccgccaagctccagggaaggggctggtgtgggtctcacgtattaatagtgatgggagtagcacaacctacgcggactccgtgaagggccgattcaccatctccagagacaacgccaagaacacgctgtatctgcaaatgaacagtctgagagccgaggacacggctgtgtattactgtgcaagagatagagtactatggatcggggagttatcctactacggtatggacgtctggggccaagggaccacggtcaccgtctcctcaggtggcggtggctcgggcggtggtgggtcgggtggcggcggatctgacatccagatgacccagtctccttccaccctgtctgcatctgtaggagacagagtcaccatcacttgccgggccagtcagagtattagtaactggttggcctggtatcagcagaaaccagggaaagcccctaaactcctgctctataaggcatctggtttagaaagtggggtcccatcaaggttcagcggcagtggatctgggacagaattcactctcaccatcaacagcctgcagcctgatgattttgcaacttattactgccaacagtctaatagttattcgtggacgttcggccacgggaccaaggtggaaatcaaacgtacgtaa

SEQ ID NO: 737 - DNA, 1599 bp, synthetic construct
  misc_feature 1..1599: note = 1412-F5.157
  source 1..1599: mol_type = other DNA
atggccctccccgtgacggcactgctgctacctctggcactgctgctgcacgccgcgcgtccccaggtgcagctggtgcagtccggagccgaggtaaagaagccaggcgcttccgtcaaggtgtcatgcaaggcctcaggctacaccttcacaagctattacatccactgggtgcgccaagctcccggtcagggcttggagtggatcgggtgcatttacccagggaacgtcaacacaaactacaacgagaagttcaaggatcgggcaaccctgaccgtggacacatccatctctaccgcctacatggagctgtcacgcctgcgctctgatgacaccgcagtgtacttctgtaccaggagtcactacggcctggactggaactttgatgtctggggccagggaaccaccgtgacggtgtccagtgtggagggcggtagtggcggctctggtgggtccggaggctcaggcggcgtgatggatgacattcagatgacccagagtccctcctccctctccgcttccgtcggagaccgcgtgaccatcacttgtcacgcctcacagaatatctacgtgtggctgaactggtaccaacagaagcccggcaaggcccccaagctgcttatctataaagcgtccaacctccacacgggagtcccttcccgcttctccggatccggcagtgggacggacttcacactcacaatctcgtcgctgcagccagaggactttgcgacgtactactgccagcagggccagacctacccatatactttcggcggcgggaccaaggtggagattaagggaggtggtggatccgaggtgcagctgttggagtctgggggaggcttggtacagcctggggggtccctgagactctcctgtgcagcctctggattcgcctttagcagctatgccatgagctgggtccgccaggctccagggaaggggctggagtgggtctcagctattagtggtagtggtggtagcacatactacgcagactccgtgaagggccggttcaccatctccagagacaattccaagaacacgctgtatctgcaaatgaacagcctgagaccgaggacacggccgtatattactgtgcgaaagatggggggtactatggttcggggagttatgggtactttgactactggggccagggaaccctggtcaccgtctcctcagggtggcggtggctcgggcggtggtgggtcgggtggcggcggatctatccagatgacccagtctccatcttccgtgtctgcatctgcaggagacagagtcaccatcacttgtcgggcgagtcagggtattagcagctggttagcctggtatcaacagaaaccagggaaagcccctaagctcctgatctatgctggatccagtttgcaaagtggggtcccatcaaggttcagcggcagtggatttgggacagatttcactctcaccatcggcagcctgcagcctgaagattttgcaacttactattgtcaacaggctagcagtttccctcggacgttcggccaagggaccaaggtggagatcaaacgtacggtgctgcaccatctgtcttcatcttcccgccatctgatgagc

SEQ ID NO: 738 - DNA, 1560 bp, synthetic construct
  misc_feature 1..1560: note = 1412-F5.77
  source 1..1560: mol_type = other DNA
atggccctccccgtgacggcactgctgctacctctggcactgctgctgcacgccgcgcgtccccaggtgcagctggtgcagtccggagccgaggtaaagaagccaggcgcttccgtcaaggtgtcatgcaaggcctcaggctacaccttcacaagctattacatccactgggtgcgccaagctcccggtcagggcttggagtggatcgggtgcatttacccagggaacgtcaacacaaactacaacgagaagttcaaggatcgggcaaccctgaccgtggacacatccatctctaccgcctacatggagctgtcacgcctgcgctctgatgacaccgcagtgtacttctgtaccaggagtcactacggcctggactggaactttgatgtctggggccagggaaccaccgtgacggtgtccagtgtggagggcggtagtggcggctctggtgggtccggaggctcaggcggcgtgatggatgacattcagatgacccagagtccctcctccctctccgcttccgtcggagaccgcgtgaccatcacttgtcacgcctcacagaatatctacgtgtggctgaactggtaccaacagaagcccggcaaggcccccaagctgcttatctataaagcgtccaacctccacacgggagtcccttcccgcttctccggatccggcagtgggacggacttcacactcacaatctcgtcgctgcagccagaggactttgcgacgtactactgccagcagggccagacctacccatatactttcggcggcgggaccaaggtggagattaagggaggtggtggatccgaggtgcagctgttggagtctgggggaggcttggtacagcctggggggtccctgagactctcctgtgcagcctctggattcacctttagcagctatgccatgagctgggtccgccaggctccagggaaggggctggagtgggtctcagctattagtggtagtggtggtagcacatactacgcagactccgtgaagggccggttcaccatctccagagacaattccaagaacacgctgtatctgcaaatgaacagcctgagagccgaggacacggccgtatattactgtgcgaaagatggggggtactatggttcggggagttatgggtactttgactactggggccagggaaccctggtcaccgtctcctcaggtggcggtggctcgggcggtggtgggtcgggtggcggcggatctgacatccagatgacccagtctccatcttccgtgtctggatctgtaggagacagagtcaccatcacttgtcgggcgagtcagggtattagcagctggttagcctggtatcagcagaaaccagggaaagcccctaagctcctgatctatgctggatccagtttgcaaagtggggtcccatcaaggttcagcggcagtggatttgggacagatttcactctcaccatcagcagcctgcagcctgaagattttgcaacttactattgtcaacaggctagcagtttccctcggacattcggccaagggaccaaggtggagatcaaacgtacg

SEQ ID NO: 739 - DNA, 1158 bp, synthetic construct
  misc_feature 1..1158: note = F2.103.CD28
  source 1..1158: mol_type = other DNA
atggccttaccagtgaccgccttgctcctgccgctggccttgctgctccacgccgccaggccggaggtgcagctggtggagtccgggggaggcttagttcagcctggggggtccctgagactctcctgtgcagtctctggattcaccttcagtacctactggatgcactgggtccgccaagctccagggaaggggctggtgtgggtctcacgtattaatagtgatgggagtagcacaacctacgcggactccgtgaagggccgattcaccatctccagagacaacgccaagaacacgctgtatctgcaaatgaacagtctgagagccgaggacacggctgtgtattactgtgcaagagatagagtactatggatcggggagttatcctactacggtatggacgtctggggccaagggaccacggtcaccgtctcctcaggtggcggtggctcgggcggtggtgggtcgggtggcggcggatctgacatccagatgacccagtctccttccaccctgtctgcatctgtaggagacagagtcaccatcacttgccgggccagtcagagtattagtaactggttggcctggtatcagcagaaaccagggaaagcccctaaactcctgctctataaggcatctggtttagaaagtggggtcccatcaaggttcagcggcagtggatctgggacagaattcactctcaccatcaacagcctgcagcctgatgattttgcaacttattactgccaacagtctaatagttattcgtggacgttcggccacgggaccaaggtggaaatcaaacgtacggctagcaccacgacgccagcgccgcgaccaccaacaccggcgcccaccatcgcgtcgcagcccctgtccctgcgcccagaggcgtgccggccagcggcggggggcgcagtgcacacgagggggctggacttcgcctgtgatttttgggtgctggtggtggttggtggagtcctggcttgctatagcttgctagtaacagtggcctttattattttctgggtgaggagtaagaggagcaggctcctgcacagtgactacatgaacatgactccccgccgccccgggcccacccgcaagcattaccagccctatgccccaccacgcgacttcgcagcctatcgctcctaa

SEQ ID NO: 740 - DNA, 1194 bp, synthetic construct
  misc_feature 1..1194: note = F5.157.CD28
  source 1..1194: mol_type = other DNA
atggccttaccagtgaccgccttgctcctgccgctggccttgctgctccacgccgccaggccggaggtgcagctgttggagtctgggggaggcttggtacagcctggggggtccctgagactctcctgtgcagcctctggattcgcctttagcagctatgccatgagctgggtccgccaggctccagggaaggggctggagtgggtctcagctattagtggtagtggtggtagcacatactacgcagactccgtgaagggccggttcaccatctccagagacaattccaagaacacgctgtatctgcaaatgaacagcctgagaccgaggacacggccgtatattactgtgcgaaagatggggggtactatggttcggggagttatgggtactttgactactggggccagggaaccctggtcaccgtctcctcagggtggcggtggctcgggcggtggtgggtcgggtggcggcggatctatccagatgacccagtctccatcttccgtgtctgcatctgcaggagacagagtcaccatcacttgtcgggcgagtcagggtattagcagctggttagcctggtatcaacagaaaccagggaaagcccctaagctcctgatctatgctggatccagtttgcaaagtggggtcccatcaaggttcagcggcagtggatttgggacagatttcactctcaccatcggcagcctgcagcctgaagattttgcaacttactattgtcaacaggctagcagtttccctcggacgttcggccaagggaccaaggtggagatcaaacgtacggtgctgcaccatctgtcttcatcttcccgccatctgatgagcgctagcaccacgacgccagcgccgcgaccaccaacaccggcgcccaccatcgcgtcgcagcccctgtccctgcgcccagaggcgtgccggccagcggcggggggcgcagtgcacacgagggggctggacttcgcctgtgatttttgggtgctggtggtggttggtggagtcctggcttgctatagcttgctagtaacagtggcctttattattttctgggtgaggagtaagaggagcaggctcctgcacagtgactacatgaacatgactccccgccgccccgggcccacccgcaagcattaccagccctatgccccaccacgcgacttcgcagcctatcgctcctaa

SEQ ID NO: 741 - DNA, 1155 bp, synthetic construct
  misc_feature 1..1155: note = F5.77.CD28
  source 1..1155: mol_type = other DNA
atggccttaccagtgaccgccttgctcctgccgctggccttgctgctccacgccgccaggccggaggtgcagctgttggagtctgggggaggcttggtacagcctggggggtccctgagactctcctgtgcagcctctggattcacctttagcagctatgccatgagctgggtccgccaggctccagggaaggggctggagtgggtctcagctattagtggtagtggtggtagcacatactacgcagactccgtgaagggccggttcaccatctccagagacaattccaagaacacgctgtatctgcaaatgaacagcctgagagccgaggacacggccgtatattactgtgcgaaagatggggggtactatggttcggggagttatgggtactttgactactggggccagggaaccctggtcaccgtctcctcaggtggcggtggctcgggcggtggtgggtcgggtggcggcggatctgacatccagatgacccagtctccatcttccgtgtctggatctgtaggagacagagtcaccatcacttgtcgggcgagtcagggtattagcagctggttagcctggtatcagcagaaaccagggaaagcccctaagctcctgatctatgctggatccagtttgcaaagtggggtcccatcaaggttcagcggcagtggatttgggacagatttcactctcaccatcagcagcctgcagcctgaagattttgcaacttactattgtcaacaggctagcagtttccctcggacattcggccaagggaccaaggtggagatcaaacgtacggctagcaccacgacgccagcgccgcgaccaccaacaccggcgcccaccatcgcgtcgcagcccctgtccctgcgcccagaggcgtgccggccagcggcggggggcgcagtgcacacgagggggctggacttcgcctgtgatttttgggtgctggtggtggttggtggagtcctggcttgctatagcttgctagtaacagtggcctttattattttctgggtgaggagtaagaggagcaggctcctgcacagtgactacatgaacatgactccccgccgccccgggcccacccgcaagcattaccagccctatgccccaccacgcgacttcgcagcctatcgctcctaa

SEQ ID NO: 742 - DNA, 1140 bp, synthetic construct
  misc_feature 1..1140: note = F2.103.BB
  source 1..1140: mol_type = other DNA
atggccttaccagtgaccgccttgctcctgccgctggccttgctgctccacgccgccaggccggaggtgcagctggtggagtccgggggaggcttagttcagcctggggggtccctgagactctcctgtgcagtctctggattcaccttcagtacctactggatgcactgggtccgccaagctccagggaaggggctggtgtgggtctcacgtattaatagtgatgggagtagcacaacctacgcggactccgtgaagggccgattcaccatctccagagacaacgccaagaacacgctgtatctgcaaatgaacagtctgagagccgaggacacggctgtgtattactgtgcaagagatagagtactatggatcggggagttatcctactacggtatggacgtctggggccaagggaccacggtcaccgtctcctcaggtggcggtggctcgggcggtggtgggtcgggtggcggcggatctgacatccagatgacccagtctccttccaccctgtctgcatctgtaggagacagagtcaccatcacttgccgggccagtcagagtattagtaactggttggcctggtatcagcagaaaccagggaaagcccctaaactcctgctctataaggcatctggtttagaaagtggggtcccatcaaggttcagcggcagtggatctgggacagaattcactctcaccatcaacagcctgcagcctgatgattttgcaacttattactgccaacagtctaatagttattcgtggacgttcggccacgggaccaaggtggaaatcaaacgtacgaccacgacgccagcgccgcgaccaccaacaccggcgcccaccatcgcgtcgcagcccctgtccctgcgcccagaggcgtgccggccagcggcggggggcgcagtgcacacgagggggctggacttcgcctgtgatatctacatctgggcgcccttggccgggacttgtggggtccttctcctgtcactggttatcaccctttactgccggggcagaaagaaactcctgtatatattcaaacaaccatttatgagaccagtacaaactactcaagaggaagatggctgtagctgccgatttccagaagaagaagaaggaggatgtgaataa

SEQ ID NO: 743 - DNA, 1176 bp, synthetic construct
  misc_feature 1..1176: note = F5.157.BB
  source 1..1176: mol_type = other DNA
atggccttaccagtgaccgccttgctcctgccgctggccttgctgctccacgccgccaggccggaggtgcagctgttggagtctgggggaggcttggtacagcctggggggtccctgagactctcctgtgcagcctctggattcgcctttagcagctatgccatgagctgggtccgccaggctccagggaaggggctggagtgggtctcagctattagtggtagtggtggtagcacatactacgcagactccgtgaagggccggttcaccatctccagagacaattccaagaacacgctgtatctgcaaatgaacagcctgagaccgaggacacggccgtatattactgtgcgaaagatggggggtactatggttcggggagttatgggtactttgactactggggccagggaaccctggtcaccgtctcctcagggtggcggtggctcgggcggtggtgggtcgggtggcggcggatctatccagatgacccagtctccatcttccgtgtctgcatctgcaggagacagagtcaccatcacttgtcgggcgagtcagggtattagcagctggttagcctggtatcaacagaaaccagggaaagcccctaagctcctgatctatgctggatccagtttgcaaagtggggtcccatcaaggttcagcggcagtggatttgggacagatttcactctcaccatcggcagcctgcagcctgaagattttgcaacttactattgtcaacaggctagcagtttccctcggacgttcggccaagggaccaaggtggagatcaaacgtacggtgctgcaccatctgtcttcatcttcccgccatctgatgagcaccacgacgccagcgccgcgaccaccaacaccggcgcccaccatcgcgtcgcagcccctgtccctgcgcccagaggcgtgccggccagcggcggggggcgcagtgcacacgagggggctggacttcgcctgtgatatctacatctgggcgcccttggccgggacttgtggggtccttctcctgtcactggttatcaccctttactgccggggcagaaagaaactcctgtatatattcaaacaaccatttatgagaccagtacaaactactcaagaggaagatggctgtagctgccgatttccagaagaagaagaaggaggatgtgaataa

SEQ ID NO: 744 - DNA, 1137 bp, synthetic construct
  misc_feature 1..1137: note = F5.77.BB
  source 1..1137: mol_type = other DNA
atggccttaccagtgaccgccttgctcctgccgctggccttgctgctccacgccgccaggccggaggtgcagctgttggagtctgggggaggcttggtacagcctggggggtccctgagactctcctgtgcagcctctggattcacctttagcagctatgccatgagctgggtccgccaggctccagggaaggggctggagtgggtctcagctattagtggtagtggtggtagcacatactacgcagactccgtgaagggccggttcaccatctccagagacaattccaagaacacgctgtatctgcaaatgaacagcctgagagccgaggacacggccgtatattactgtgcgaaagatggggggtactatggttcggggagttatgggtactttgactactggggccagggaaccctggtcaccgtctcctcaggtggcggtggctcgggcggtggtgggtcgggtggcggcggatctgacatccagatgacccagtctccatcttccgtgtctggatctgtaggagacagagtcaccatcacttgtcgggcgagtcagggtattagcagctggttagcctggtatcagcagaaaccagggaaagcccctaagctcctgatctatgctggatccagtttgcaaagtggggtcccatcaaggttcagcggcagtggatttgggacagatttcactctcaccatcagcagcctgcagcctgaagattttgcaacttactattgtcaacaggctagcagtttccctcggacattcggccaagggaccaaggtggagatcaaacgtacgaccacgacgccagcgccgcgaccaccaacaccggcgcccaccatcgcgtcgcagcccctgtccctgcgcccagaggcgtgccggccagcggcggggggcgcagtgcacacgagggggctggacttcgcctgtgatatctacatctgggcgcccttggccgggacttgtggggtccttctcctgtcactggttatcaccctttactgccggggcagaaagaaactcctgtatatattcaaacaaccatttatgagaccagtacaaactactcaagaggaagatggctgtagctgccgatttccagaagaagaagaaggaggatgtgaataa

SEQ ID NO: 745 - DNA, 1149 bp, synthetic construct
  misc_feature 1..1149: note = 4D11.CD28
  source 1..1149: mol_type = other DNA
atggccttaccagtgaccgccttgctcctgccgctggccttgctgctccacgccgccaggccgcagctgcagctgcaggagtcgggcccaggactactgaagccttcggagaccctgtccctcacctgcactgtctctggcggctccatcagcagtcctggttactacgggggctggatccgccagcccccagggaaggggctggagtggattgggagtatctataaaagtgggagcacctaccacaacccgtccctcaagagtcgagtcaccatatccgtagacacgtccaagaaccagttctccctgaagctgagctctgtgaccgccgcagacacggctgtgtattactgtacgagacctgtagtacgatattttgggtggttcgacccctggggccagggaaccctggtcaccgtctcctcagctagcggtggcggtggctcgggcggtggtgggtcgggtggcggcggatctgccatccagttgacccagtctccatcctccctgtctgcatctgtaggagacagagtcaccatcacttgccgggcaagtcagggcattagcagtgctttagcctggtatcagcagaaaccagggaaagctcctaagctcctgatctatgatgcctccaatttggaaagtggggtcccatcaaggttcagcggcagtggatctgggacagatttcactctcaccatcagcagcctgcagcctgaagattttgcaacttattactgtcaacagtttaatagttacccgacgttcggccaagggaccaaggtggaaatcaaacgtacggctagcaccacgacgccagcgccgcgaccaccaacaccggcgcccaccatcgcgtcgcagcccctgtccctgcgcccagaggcgtgccggccagcggcggggggcgcagtgcacacgagggggctggacttcgcctgtgatttttgggtgctggtggtggttggtggagtcctggcttgctatagcttgctagtaacagtggcctttattattttctgggtgaggagtaagaggagcaggctcctgcacagtgactacatgaacatgactccccgccgccccgggcccacccgcaagcattaccagccctatgccccaccacgcgacttcgcagcctatcgctcctaa

SEQ ID NO: 746 - DNA, 1134 bp, synthetic construct
  misc_feature 1..1134: note = A40C.CD28
  source 1..1134: mol_type = other DNA
atggccttaccagtgaccgccttgctcctgccgctggccttgctgctccacgccgccaggccgcaggtccagctggtacaatctggtgctgaagtgaagaaaccaggagcgtcggtgaaggtctcatgcacagcctcaggcttcaacatcaaggactactacgtgcactgggtcaagcaagctcccggacaggggctggagtggatggggagaattgacccggaagacggcgactcgaaatacgcgccgaagttccagggcaaggccaccatgacagccgataccagtacatcgaccgtttacatggagctgtccagcctccgctcagaggataccgcggtatactactgtacgacctcctactacgtcggaacgtacggttactggggccagggtaccctggtgacagtgtcctcggggggcggcgggtctggcgggggaggcagcgggggcggcgggtcggacatccagatgactcaatccccctcttccctgagtgcgtccgtgggtgacagggtgacgatcacttgtagcgcttcgtcctcggtgtcgtatatgctgtggttccagcagaagcccggtaaggcccccaaactgctcatttattccaccagcaacctcgccagtggcgtacccagtcgcttctccggtagtggctccggtaccgatttcacactgaccatctccagtctgcaacctgaagacttcgcaacgtactattgtcagcagcgcacattctatccctatacgtttgggggcgggaccaaggtcgagatcaagcgcacagctagcaccacgacgccagcgccgcgaccaccaacaccggcgcccaccatcgcgtcgcagcccctgtccctgcgcccagaggcgtgccggccagcggcggggggcgcagtgcacacgagggggctggacttcgcctgtgatttttgggtgctggtggtggttggtggagtcctggcttgctatagcttgctagtaacagtggcctttattattttctgggtgaggagtaagaggagcaggctcctgcacagtgactacatgaacatgactccccgccgccccgggcccacccgcaagcattaccagccctatgccccaccacgcgacttcgcagcctatcgctcctaa

SEQ ID NO: 747 - DNA, 1158 bp, synthetic construct
  misc_feature 1..1158: note = 119.CD28
  source 1..1158: mol_type = other DNA
atggccttaccagtgaccgccttgctcctgccgctggccttgctgctccacgccgccaggccgcaggtccaactgcagcagtcaggtccaggactggtgaagccctcgcagaccctctcactcacctgtgccatctccggggacagtgtctctagcaacagtgctacttggaactggatcaggcagtccccatcgagagaccttgagtggctgggaaggacatactacaggtccaagtggtatcgtgattatgtaggatctgtgaaaagtcgaataatcatcaacccagacacatccaacaaccagttctccctgcagctgaactctgtgactcccgaggacacggctatatattactgtacaagagcacagtggctgggaggggattacccctactactacagtatggacgtctggggccaagggaccacggtcaccgtctcttcaggtggcggtggctcgggcggtggtgggtcgggtggcggcggatctgagatcgtgctgacgcagagtcccgccaccctgtccctgtcgcccggcgagcgggccactctctcctgcagggccagtcagtccgtgtccagttatctcgcatggtaccaacagaagccagggcaggcccctcggctgctcatatacgacgcttcaaatcgcgccaccgggatccctgcaaggttctccggctccggcagtggcaccgattttaccctcacaatttcctccctggagccggaggacttcgccgtgtattactgccaacagaggagtaacaccttcggccccggcacaaaggtcgacattaagcgcactgctagcaccacgacgccagcgccgcgaccaccaacaccggcgcccaccatcgcgtcgcagcccctgtccctgcgcccagaggcgtgccggccagcggcggggggcgcagtgcacacgagggggctggacttcgcctgtgatttttgggtgctggtggtggttggtggagtcctggcttgctatagcttgctagtaacagtggcctttattattttctgggtgaggagtaagaggagcaggctcctgcacagtgactacatgaacatgactccccgccgccccgggcccacccgcaagcattaccagccctatgccccaccacgcgacttcgcagcctatcgctcctaa

SEQ ID NO: 748 - DNA, 1470 bp, synthetic construct
  misc_feature 1..1470: note = 4D5.BBZ (Her2 CAR)
  source 1..1470: mol_type = other DNA
atggacttccaggttcagatcttttcgttcctgctgatcagcgcctctgttatcatgtcgcgcggcgacatccagatgacccagtccccttcctccctctctgcctctgtgggagaccgcgttaccatcacatgccgagcttcccaggacgtgaacacagccgtggcctggtaccagcagaagcccgggaaggcacccaaactcctcatctactccgcctccttcctatacagtggcgtgccttcccgattctccggctccaggagtggcacggactttacgctcaccattagtagcctgcagcccgaagacttcgcgacctactattgtcagcaacactacacgacgccaccaactttcggccagggtaccaaggtcgagattaagcgaaccggcagtaccagtgggtctggcaagcccggcagcggcgagggatccgaggtccagctggtcgagtccggcgggggcctggtgcagccgggcggctcgctgaggttatcttgcgccgccagtggcttcaacatcaaggatacttacatccactgggtgaggcaggctccgggcaagggcctggaatgggtggctaggatctaccctactaacgggtacacacgctacgcagattcggtgaaaggccgcttcactatctccgccgacacctcgaagaacactgcttacctgcagatgaactccctcagggccgaagatactgcagtctactactgctcccgctggggtggggacggcttctacgccatggacgtgtggggtcagggcactctagttacagtgtcatccaccacgacgccagcgccgcgaccaccaacaccggcgcccaccatcgcgtcgcagcccctgtccctgcgcccagaggcgtgccggccagcggcggggggcgcagtgcacacgagggggctggacttcgcctgtgatatctacatctgggcgcccttggccgggacttgtggggtccttctcctgtcactggttatcaccctttactgcaaacggggcagaaagaaactcctgtatatattcaaacaaccatttatgagaccagtacaaactactcaagaggaagatggctgtagctgccgatttccagaagaagaagaaggaggatgtgaactgagagtgaagttcagcaggagcgcagacgcccccgcgtacaagcagggccagaaccagctctataacgagctcaatctaggacgaagagaggagtacgacgttttggacaagagacgtggccgggaccctgagatggggggaaagccgagaaggaagaaccctcaggaaggcctgtacaatgaactgcagaaagataagatggcggaggcctacagtgagattgggatgaaaggcgagcgccggaggggcaaggggcacgatggcctttaccagggtctcagtacagccaccaaggacacctacgacgcccttcacatgcaggccctgccccctcgctaa

SEQ ID NO: 749 - DNA, 1461 bp, synthetic construct
  misc_feature 1..1461: note = FMC63.BBZ (CD19 CAR)
  source 1..1461: mol_type = other DNA
atggccttaccagtgaccgccttgctcctgccgctggccttgctgctccacgccgccaggccggacatccagatgacacagactacatcctccctgtctgcctctctgggagacagagtcaccatcagttgcagggcaagtcaggacattagtaaatatttaaattggtatcagcagaaaccagatggaactgttaaactcctgatctaccatacatcaagattacactcaggagtcccatcaaggttcagtggcagtgggtctggaacagattattctctcaccattagcaacctggagcaagaagatattgccacttacttttgccaacagggtaatacgcttccgtacacgttcggaggggggaccaagctggagatcacaggtggcggtggctcgggcggtggtgggtcgggtggcggcggatctgaggtgaaactgcaggagtcaggacctggcctggtggcgccctcacagagcctgtccgtcacatgcactgtctcaggggtctcattacccgactatggtgtaagctggattcgccagcctccacgaaagggtctggagtggctgggagtaatatggggtagtgaaaccacatactataattcagctctcaaatccagactgaccatcatcaaggacaactccaagagccaagttttcttaaaaatgaacagtctgcaaactgatgacacagccatttactactgtgccaaacattattactacggtggtagctatgctatggactactggggccaaggaacctcagtcaccgtctcctcaaccacgacgccagcgccgcgaccaccaacaccggcgcccaccatcgcgtcgcagcccctgtccctgcgcccagaggcgtgccggccagcggcggggggcgcagtgcacacgagggggctggacttcgcctgtgatatctacatctgggcgcccttggccgggacttgtggggtccttctcctgtcactggttatcaccctttactgcaaacggggcagaaagaaactcctgtatatattcaaacaaccatttatgagaccagtacaaactactcaagaggaagatggctgtagctgccgatttccagaagaagaagaaggaggatgtgaactgagagtgaagttcagcaggagcgcagacgcccccgcgtacaagcagggccagaaccagctctataacgagctcaatctaggacgaagagaggagtacgatgttttggacaagagacgtggccgggaccctgagatggggggaaagccgagaaggaagaaccctcaggaaggcctgtacaatgaactgcagaaagataagatggcggaggcctacagtgagattgggatgaaaggcgagcgccggaggggcaaggggcacgatggcctttaccagggtctcagtacagccaccaaggacacctacgacgcccttcacatgcaggccctgccccctcgctaa

SEQ ID NO: 750 - DNA, 1467 bp, synthetic construct
  misc_feature 1..1467: note = ss1.BBZ ( CAR)
  source 1..1467: mol_type = other DNA
atggccttaccagtgaccgccttgctcctgccgctggccttgctgctccacgccgccaggccgggatcccaggtacaactgcagcagtctgggcctgagctggagaagcctggcgcttcagtgaagatatcctgcaaggcttctggttactcattcactggctacaccatgaactgggtgaagcagagccatggaaagagccttgagtggattggacttattactccttacaatggtgcttctagctacaaccagaagttcaggggcaaggccacattaactgtagacaagtcatccagcacagcctacatggacctcctcagtctgacatctgaagactctgcagtctatttctgtgcaagggggggttacgacgggaggggttttgactactggggccaagggaccacggtcaccgtctcctcaggtggaggcggttcaggcggcggtggctctagcggtggcggatcggacatcgagctcactcagtctccagcaatcatgtctgcatctccaggggagaaggtcaccatgacctgcagtgccagctcaagtgtaagttacatgcactggtaccagcagaagtcaggcacctcccccaaaagatggatttatgacacatccaaactggcttctggagtcccaggtcgcttcagtggcagtgggtctggaaactcttactctctcacaatcagcagcgtggaggctgaagatgatgcaacttattactgccagcagtggagtaagcaccctctcacgtacggtgctgggacaaagttggaaatcaaagctagcaccacgacgccagcgccgcgaccaccaacaccggcgcccaccatcgcgtcgcagcccctgtccctgcgcccagaggcgtgccggccagcggcggggggcgcagtgcacacgagggggctggacttcgcctgtgatatctacatctgggcgcccttggccgggacttgtggggtccttctcctgtcactggttatcaccctttactgcaaacggggcagaaagaaactcctgtatatattcaaacaaccatttatgagaccagtacaaactactcaagaggaagatggctgtagctgccgatttccagaagaagaagaaggaggatgtgaactgagagtgaagttcagcaggagcgcagacgcccccgcgtacaagcagggccagaaccagctctataacgagctcaatctaggacgaagagaggagtacgatgttttggacaagagacgtggccgggaccctgagatggggggaaagccgagaaggaagaaccctcaggaaggcctgtacaatgaactgcagaaagataagatggcggaggcctacagtgagattgggatgaaaggcgagcgccggaggggcaaggggcacgatggcctttaccagggtctcagtacagccaccaaggacacctacgacgcccttcacatgcaggccctgccccctcgctaa

SEQ ID NO: 751 - DNA, 1386 bp, synthetic construct
  misc_feature 1..1386: note = J591.BBZ (PSMA CAR)
  source 1..1386: mol_type = other DNA
atgacccagtctcacaaattcatgtccacatcagtaggagacagggtcagcatcatctgtaaggccagtcaagatgtgggtactgctgtagactggtatcaacagaaaccaggacaatctcctaaactactgatttattgggcatccactcggcacactggagtccctgatcgcttcacaggcagtggatctgggacagacttcactctcaccattactaacgttcagtctgaagacttggcagattatttctgtcagcaatataacagctatcctctcacgttcggtgctgggaccatgctggacctgaaaggaggcggaggatctggcggcggaggaagttctggcggaggcagcgaggtgcagctgcagcagagcggacccgagctcgtgaagcctggaacaagcgtgcggatcagctgcaagaccagcggctacaccttcaccgagtacaccatccactgggtcaagcagtcccacggcaagagcctggagtggatcggcaatatcaaccccaacaacggcggcaccacctacaaccagaagttcgaggacaaggccaccctgaccgtggacaagagcagcagcaccgcctacatggaactgcggagcctgaccagcgaggacagcgccgtgtactattgtgccgccggttggaacttcgactactggggccagggcacaaccctgacagtgtctagcgctagctccggaaccacgacgccagcgccgcgaccaccaacaccggcgcccaccatcgcgtcgcagcccctgtccctgcgcccagaggcgtgccggccagcggcggggggcgcagtgcacacgagggggctggacttcgcctgtgatatctacatctgggcgcccttggccgggacttgtggggtccttctcctgtcactggttatcaccctttactgcaaacggggcagaaagaaactcctgtatatattcaaacaaccatttatgagaccagtacaaactactcaagaggaagacggctgtagctgccgatttccagaagaagaagaaggaggatgtgaactgagagtgaagttcagcaggagcgcagacgcccccgcgtacaagcagggccagaaccagctctataacgagctcaatctaggacgaagagaggagtacgacgttttggacaagagacgtggccgggaccctgagatggggggaaagccgagaaggaagaaccctcaggaaggcctgtacaacgaactgcagaaagataagatggcggaggcctacagtgagattgggatgaaaggcgagcgccggaggggcaaggggcacgacggcctttaccagggtctcagtacagccaccaaggacacctacgacgcccttcacatgcaggccctgccccctcgctaa

SEQ ID NO: 752 - DNA, 1599 bp, synthetic construct
  misc_feature 1..1599: note = c-Met CAR
  source 1..1599: mol_type = other DNA
atggccttaccagtgaccgccttgctcctgccgctggccttgctgctccacgccgccaggccgggatccgacatccagatgacccagagccccagcagcgtgagcgccagcgtgggcgaccgggtgaccatcacctgccgggccagccagggcatcaacacctggctggcctggtatcagcagaagcccggcaaggcccccaagctgctgatctacgccgccagcagcctgaagagcggcgtgcccagccggtttagcggctctggctctggcgccgacttcaccctgaccatcagcagcctgcagcccgaggacttcgccacctactactgccagcaggccaacagcttccccctgacctttggcggcggaacaaaggtggagatcaagggcagcacctccggcagcggcaagcctggcagcggcgagggcagcaccaagggccaggtgcagctggtgcagagcggagccgaggtgaagaagcctggcgcctccgtcaaggtgtcctgcgaggccagcggctacaccttcaccagctacggcttcagctgggtgcggcaggcaccaggccagggcctcgagtggatgggctggatcagcgccagcaacggcaacacctactacgcccagaagctgcagggcagggtcaccatgaccaccgacaccagcaccagcagcgcctacatggaactgcggagcctgagaagcgacgacaccgccgtgtactactgcgccagggtgtacgccgactacgccgattactggggccagggcaccctggtgaccgtggctagcaccacgacgccagcgccgcgaccaccaacaccggcgcccaccatcgcgtcgcagcccctgtccctgcgcccagaggcgtgccggccagcggcggggggcgcagtgcacacgagggggctggacttcgcctgtgatttttgggtgctggtggtggttggtggagtcctggcttgctatagcttgctagtaacagtggcctttattattttctgggtgaggagtaagaggagcaggctcctgcacagtgactacatgaacatgactccccgccgccccgggcccacccgcaagcattaccagccctatgccccaccacgcgacttcgcagcctatcgctccaaacggggcagaaagaaactcctgtatatattcaaacaaccatttatgagaccagtacaaactactcaagaggaagatggctgtagctgccgatttccagaagaagaagaaggaggatgtgaactgagagtgaagttcagcaggagcgcagacgcccccgcgtacaagcagggccagaaccagctctataacgagctcaatctaggacgaagagaggagtacgatgttttggacaagagacgtggccgggaccctgagatggggggaaagccgagaaggaagaaccctcaggaaggcctgtacaatgaactgcagaaagataagatggcggaggcctacagtgagattgggatgaaaggcgagcgccggaggggcaaggggcacgatggcctttaccagggtctcagtacagccaccaaggacacctacgacgcccttcacatgcaggccctgccccctcgctaa

SEQ ID NO: 753 - DNA, 1452 bp, synthetic construct
  misc_feature 1..1452: note = BCMA CAR
  source 1..1452: mol_type = other DNA
atggccttaccagtgaccgccttgctcctgccgctggccttgctgctccacgccgccaggccggaagtgcaattggtggaatcagggggaggacttgtgcagcctggaggatcgctgagactgtcatgtgccgtgtccggctttgccctgtccaaccacgggatgtcctgggtccgccgcgcgcctggaaagggcctcgaatgggtgtcgggtattgtgtacagcggtagcacctactatgccgcatccgtgaaggggagattcaccatcagccgggacaactccaggaacactctgtacctccaaatgaattcgctgaggccagaggacactgccatctactactgctccgcgcatggcggagagtccgacgtctggggacaggggaccaccgtgaccgtgtctagcgcgtccggcggaggcggcagcgggggtcgggcatcagggggcggcggatcggacatccagctcacccagtccccgagctcgctgtccgcctccgtgggagatcgggtcaccatcacgtgccgcgccagccagtcgatttcctcctacctgaactggtaccaacagaagcccggaaaagccccgaagcttctcatctacgccgcctcgagcctgcagtcaggagtgccctcacggttctccggctccggttccggtactgatttcaccctgaccatttcctccctgcaaccggaggacttcgctacttactactgccagcagtcgtactccaccccctacactttcggacaaggcaccaaggtcgaaatcaagaccacgacgccagcgccgcgaccaccaacaccggcgcccaccatcgcgtcgcagcccctgtccctgcgcccagaggcgtgccggccagcggcggggggcgcagtgcacacgagggggctggacttcgcctgtgatatctacatctgggcgcccttggccgggacttgtggggtccttctcctgtcactggttatcaccctttactgcaaacggggcagaaagaaactcctgtatatattcaaacaaccatttatgagaccagtacaaactactcaagaggaagatggctgtagctgccgatttccagaagaagaagaaggaggatgtgaactgagagtgaagttcagcaggagcgcagacgcccccgcgtacaagcagggccagaaccagctctataacgagctcaatctaggacgaagagaggagtacgatgttttggacaagagacgtggccgggaccctgagatggggggaaagccgagaaggaagaaccctcaggaaggcctgtacaatgaactgcagaaagataagatggcggaggcctacagtgagattgggatgaaaggcgagcgccggaggggcaaggggcacgatggcctttaccagggtctcagtacagccaccaaggacacctacgacgcccttcacatgcaggccctgccccctcgctaa

SEQ ID NO: 754 - DNA, 1095 bp, synthetic construct
  misc_feature 1..1095: note = FHVH33.BBZ (BCMA CAR)
  source 1..1095: mol_type = other DNA
atggcactcccagtaaccgcgctgttgctccctctggccctgctgctgcacgctgcgcgccctgaggttcagctgctggagtccgggggcgggttagtccagcccggcggaagcctgcgcctgtcctgcgccgcatccggattcaccttcagttcgtacgccatgagttgggttcggcaggctcccggaaagggtctggagtgggtgtcaagcatcagtggaagtggtgattacatctactacgccgacagcgtcaagggacgcttcactatcagtcgggacatctctaagaacaccctgtacctccagatgaattccctgagggccgaggacaccgccgtctattactgcgccaaggaggggaccggtgctaactcttccttggccgactatcgcggtcagggcaccctagtgactgtttcgtccaccacgacgccagcgccgcgaccaccaacaccggcgcccaccatcgcgtcgcagcccctgtccctgcgcccagaggcgtgccggccagcggcggggggcgcagtgcacacgagggggctggacttcgcctgtgatatctacatctgggcgcccttggccgggacttgtggggtccttctcctgtcactggttatcaccctttactgccggggcagaaagaaactcctgtatatattcaaacaaccatttatgagaccagtacaaactactcaagaggaagatggctgtagctgccgatttccagaagaagaagaaggaggatgtgaactgagagtgaagttcagcaggagcgcagacgcccccgcgtacaagcagggccagaaccagctctataacgagctcaatctaggacgaagagaggagtacgatgttttggacaagagacgtggccgggaccctgagatggggggaaagccgagaaggaagaaccctcaggaaggcctgtacaatgaactgcagaaagataagatggcggaggcctacagtgagattgggatgaaaggcgagcgccggaggggcaaggggcacgatggcctttaccagggtctcagtacagccaccaaggacacctacgacgcccttcacatgcaggccctgccccctcgctaa

SEQ ID NO: 755 - DNA, 1467 bp, synthetic construct
  misc_feature 1..1467: note = BCMA338.BBZ (BCMA CAR)
  source 1..1467: mol_type = other DNA
atggctctgcccgtcaccgctctgctgctgcctctggctctgctgctgcacgctgctcgccctcaggtcaaactggaagaatctggcggaggcctggtgcaggcaggacggagcctgcgcctgagctgcgcagcatccgagcacaccttcagctcccacgtgatgggctggtttcggcaggccccaggcaaggagagagagagcgtggccgtgatcggctggagggacatctccacatcttacgccgattccgtgaagggccggttcaccatcagccgggacaacgccaagaagacactgtatctgcagatgaacagcctgaagcccgaggacaccgccgtgtactattgcgcagcaaggagaatcgacgcagcagactttgattcctggggccagggcacccaggtgacagtgtctagcggaggaggaggatctgaggtgcagctggtggagagcggaggcggcctggtgcaggccggaggctctctgaggctgagctgtgcagcatccggaagaaccttcacaatgggctggtttaggcaggcaccaggaaaggagagggagttcgtggcagcaatcagcctgtcccctaccctggcctactatgccgagagcgtgaagggcaggtttaccatctcccgcgataacgccaagaatacagtggtgctgcagatgaactccctgaaacctgaggacacagccctgtactattgtgccgccgatcggaagagcgtgatgagcattagaccagactattgggggcagggaacacaggtgaccgtgagcagcactagtaccacgacgccagcgccgcgaccaccaacaccggcgcccaccatcgcgtcgcagcccctgtccctgcgcccagaggcgtgccggccagcggcggggggcgcagtgcacacgagggggctggacttcgcctgtgatatctacatctgggcgcccttggccgggacttgtggggtccttctcctgtcactggttatcaccctttactgcaaacggggcagaaagaaactcctgtatatattcaaacaaccatttatgagaccagtacaaactactcaagaggaagatggctgtagctgccgatttccagaagaagaagaaggaggatgtgaactgagagtgaagttcagcaggagcgcagacgcccccgcgtaccagcagggccagaaccagctctataacgagctcaatctaggacgaagagaggagtacgatgttttggacaagagacgtggccgggaccctgagatggggggaaagccgagaaggaagaaccctcaggaaggcctgtacaatgaactgcagaaagataagatggcggaggcctacagtgagattgggatgaaaggcgagcgccggaggggcaaggggcacgatggcctttaccagggtctcagtacagccaccaaggacacctacgacgcccttcacatgcaggccctgccccctcgctaa

SEQ ID NO: 756 - DNA, 1461 bp, synthetic construct
  misc_feature 1..1461: note = G33.BBZ (GPC3 CAR)
  source 1..1461: mol_type = other DNA
atggctctccctgtgaccgccctcttgctgccgctggccctcctgctgcacgccgcacggccgcaggtgcagctgcagcagtcgggggccgagctggtgcggcccggggcctccgtcaagctgtcctgcaaggccagtgggtacaccttcactgattatgagatgcactgggtgaagcagacccctgtgcatggcctgaaatggatcggcgctctcgaccccaagacaggtgacaccgcctacagtcagaagtttaagggcaaagcaaccctcaccgccgacaagtcgtcctcgaccgcctacatggagctgaggtccctgacctccgaggattcggccgtctactactgcacccgcttctactcctacacatactggggccagggtaccttagtgaccgtctcggcaggcggggggggctccgggggtggcggcagtggtggggggggctccgacgtggtgatgacacagacccctctgtccctcccagtttcgctcggtgaccaggcatcgatctcgtgccgctcctcacagagtctggtgcactccaacggcaacacatatctgcactggtacctccagaagcccgggcagtcacctaagctcctcatctacaaggtgagtaatcgattcagtggcgtgccagacaggttctccggctccgggagtggaacggatttcaccctgaagatctcccgcgtggaggcggaggacctgggagtctacttctgctcgcagaacacccacgtcccgcccacgtttggcagtggcactaagctcgagatcaaaaccacgacgccagcgccgcgaccccccaccccggcgccgacaatcgcatcgcagcccctgagcctgaggcccgaggcatgtaggcccgccgcaggcggagccgtccacaccagggggctcgactttgcatgcgatatctacatttgggcccctctggccggcacctgcggagtgctcctcctcagtctggtgatcacactctactgtaagaggggccgcaagaagctgctgtacatcttcaagcagcccttcatgcgccccgtccagaccacccaggaagaagatgggtgcagctgcagattccccgaggaggaggaaggggggtgcgaattgcgcgttaagttctcgcgttccgccgacgccccagcttacaagcagggccagaaccagctttataacgagctcaatttgggccggagggaggagtacgacgtactcgacaagcgccgcggccgcgaccccgaaatgggtggaaagccccggcgcaaaaacccccaggaggggctgtacaacgagctgcagaaggataagatggctgaggcctactctgagatcggtatgaagggcgagcggcgccgcggcaagggacacgatggcctgtaccaggggctgtccacggccacaaaggatacgtacgacgctctgcacatgcaggccctgcccccccgctaa

SEQ ID NO: 757 - DNA, 1440 bp, synthetic construct
  misc_feature 1..1440: note = C10.BBZ (EGFR CAR)
  source 1..1440: mol_type = other DNA
atgggttggtcgtgcattatcctcttcctcgtcgcaaccgctaccggcgttcactcggattacaaggatgacgacgacaaagaggtacagctggtgcagagcggggccgaggttaagaagcccgggtcttccgtaaaggtgtcctgcaaggcctcggggggcacattctcatcgtacgcaatatcgtgggtgcggcaggcccccgggcaggggctggaatggatgggcggaattatcccaatcttcgggaccgccaactatgcccagaagtttcagggtcgtgtgaccattactgccgacgagtccaccagtacggcctacatggagctgagtagtctgcgtagcgaggatactgccgtttattattgcgcccgggaagagggaccgtactgctcgtcgacctcatgttacggcgccttcgacatctggggccaaggcaccctggtgacggtgtcctccggtggtggcggaagtggcggcggggggtccggcgggggcggttcacagtccgtcctgacccaggatcccgcggtgtcggtcgcgctgggtcagacagtaaagataacatgccagggcgattctctgcgcagttatttcgcctcgtggtaccagcagaaacccggccaggctcctacccttgttatgtacgcgcgcaatgacagacccgcgggcgtgcccgaccgcttctccggctcaaagagcgggacctccgcctccctggccatctccgggctccagtctgaggatgaggccgattactactgcgctgcttgggacgactccctcaatggctatctgtttggcgcaggcacaaagctgaccgtgctcggaagggtcaccgtctcttcagcggagcccaaatcttgtgacaaaactcacacctgcccaccgtgcccgggatccatctacatctgggcccctctggccggcacctgtggcgtgctgctgctgtccctggtcatcaccctgtactgcaagcggggcagaaagaagctgctgtacatcttcaagcagcccttcatgcggcctgtgcagaccacacaggaagaggacggctgtagctgtagattccccgaggaagaggaaggcggctgcgagctgagagtgaagttcagcagaagcgccgacgcccctgcctatcagcagggccagaaccagctgtacaacgagctgaacctgggcagacgggaggaatacgacgtgctggacaagagaagaggccgggaccctgagatgggcggcaagcccagacggaagaacccccaggaaggcctgtataacgaactgcagaaagacaagatggccgaggcctacagcgagatcggcatgaagggcgagcggagaagaggcaagggccatgacggcctgtaccagggcctgagcaccgccaccaaggacacctacgacgccctgcacatgcaggccctgcctccaagatga

SEQ ID NO: 758 - DNA, 1452 bp, synthetic construct
  misc_feature 1..1452: note = 2B3.BBZ (PSCA CAR)
  source 1..1452: mol_type = other DNA
atggcgctaccggtgaccgcactcctgctgccactcgccctcctgctccacgccgcccgccccgatatccagctgacccaatcaccgtcgtccctgtctgcctccgtgggcgaccgggtgacgatcacctgtagtgcctcgagcagtgtacggttcatccactggtaccaacagaagcccggcaaggcaccaaagcggctgatctacgacaccagcaagctggcgtctggggtgcccagcaggttctcgggaagtggtagtggcacagacttcactctcaccatcagttcactccagccggaggactttgccacctactattgccagcagtggtcctcgtccccctttaccttcggccagggaacaaaggtggaaattaagggttcgacctccggggggggctccggtgggggctccggcggggggggctcatcggaggttcagctggtggagagcggcggcggcctggtgcagcccggcgggagtctgcggctgtcctgtgccgccagcggcttcaacatcaaggactactacattcactgggtgcggcaagccccaggcaagggtctggagtgggtggcttggattgaccctgaaaacggcgacactgagttcgtgccaaaattccaggggcgggcgaccatctccgccgacacctccaagaatacggcctacctgcagatgaactccctgcgcgccgaagacacagcggtctactactgcaagacagggggtttctggggccagggcaccctcgtgaccgtttcgagtgccgccggcaccacgacgccagcgccgcgaccaccaacaccggcgcccaccatcgcgtcgcagcccctgtccctgcgcccagaggcgtgccggccagcggcggggggcgcagtgcacacgagggggctggacttcgcctgtgatatctacatctgggcgcccttggccgggacttgtggggtccttctcctgtcactggttatcaccctttactgcaaacggggcagaaagaaactcctgtatatattcaaacaaccatttatgagaccagtacaaactactcaagaggaagatggctgtagctgccgatttccagaagaagaagaaggaggatgtgaactgagagtgaagttcagcaggagcgcagacgcccccgcgtacaagcagggccagaaccagctctataacgagctcaatctaggacgaagagaggagtacgacgttttggacaagagacgtggccgggaccctgagatggggggaaagccgagaaggaagaaccctcaggaaggcctgtacaatgaactgcagaaagataagatggcggaggcctacagtgagattgggatgaaaggcgagcgccggaggggcaaggggcacgatggcctttaccagggtctcagtacagccaccaaggacacctacgacgcccttcacatgcaggccctgccccctcgctaa

SEQ ID NO: 759 - DNA, 1002 bp, synthetic construct
  misc_feature 1..1002: note = 7G3L.BBZ (CD123 CAR)
  source 1..1002: mol_type = other DNA
atgacacagtcgccagactcgctcgcggttagcctcggggagcgcgctactatcaactgtaagtcgtcccagtccctgctgaactcggggaaccagaagaactacctcacctggtacctgcagaagcctggtcagcccccaaaactgttgatctactgggctagcacgcgggagtcgggcgtcccagaccgcttcagtggtagcggcagtgggaccgacttcacactgacaatctcgtcgcttcaggctgaggatgtggcggtctattactgtcagaacgactattcatacccctatacgttcggccagggcaccaagctggaaatcaagaggaccacgacgccagcgccgcgaccaccaacaccggcgcccaccatcgcgtcgcagcccctgtccctgcgcccagaggcgtgccggccagcggcggggggcgcagtgcacacgagggggctggacttcgcctgtgatatctacatctgggcgcccttggccgggacttgtggggtccttctcctgtcactggttatcaccctttactgccggggcagaaagaaactcctgtatatattcaaacaaccatttatgagaccagtacaaactactcaagaggaagatggctgtagctgccgatttccagaagaagaagaaggaggatgtgaactgagagtgaagttcagcaggagcgcagacgcccccgcgtacaagcagggccagaaccagctctataacgagctcaatctaggacgaagagaggagtacgatgttttggacaagagacgtggccgggaccctgagatggggggaaagccgagaaggaagaaccctcaggaaggcctgtacaatgaactgcagaaagataagatggcggaggcctacagtgagattgggatgaaaggcgagcgccggaggggcaaggggcacgatggcctttaccagggtctcagtacagccaccaaggacacctacgacgcccttcacatgcaggccctgccccctcgctaa

SEQ ID NO: 760 - DNA, 1524 bp, synthetic construct
  misc_feature 1..1524: note = 14.g2a.BBZ (GD2 CAR)
  source 1..1524: mol_type = other DNA
atggagttcggcctctcctggctctttctggtcgcgatcctgaaaggtgtgcagtgttccagggacatcctgctgacgcagactcccctgtctctgcccgtgtcgctgggcgaccaggcctctatctcctgcagatcatctcagtccctggtgcacaggaatggcaatacctacctccactggtatctgcagaagcccggccagtcacccaagttgctgatccacaaggtgtccaatcgtttctcgggggtccctgaccgcttctccgggtccggcagtggcaccgatttcaccctgaagatttcccgcgtggaggccgaggacctcggtgtctacttctgttcccagtccacccacgtgcccccactcacctttggcgccggtaccaaactcgaactcaagcgcgcggacgcagcccccacggtgtcaatcttccccggttcgggcggtgggggctccgggggagaggtgaagctgcagcagagcggcccctcgctcgtcgagccaggtgcgtccgtgatgatctcctgcaaggcctcggggtcatcgttcactggctacaacatgaactgggtgcggcagaacattggcaagtcgctcgagtggattggggctatcgacccctattacgggggcacctcctacaaccagaagttcaaaggccgggccaccctgactgtggataagagctcgtccacggcctacatgcacctgaagtccctgacttcagaggattcggcggtgtactactgcgtgagtggcatggagtactgggggcaggggacttcggtcaccgtctcgtccgctaagacgacccccccatccgtctacgggcgagttacagtctctagtaccacgacgccagcgccgcgaccaccaacaccggcgcccaccatcgcgtcgcagcccctgtccctgcgcccagaggcgtgccggccagcggcggggggcgcagtgcacacgagggggctggacttcgcctgtgatatctacatctgggcgcccttggccgggacttgtggggtccttctcctgtcactggttatcaccctttactgcaaacggggcagaaagaaactcctgtatatattcaaacaaccatttatgagaccagtacaaactactcaagaggaagatggctgtagctgccgatttccagaagaagaagaaggaggatgtgaactgagagtgaagttcagcaggagcgcagacgcccccgcgtacaagcagggccagaaccagctctataacgagctcaatctaggacgaagagaggagtacgatgttttggacaagagacgtggccgggaccctgagatggggggaaagccgagaaggaagaaccctcaggaaggcctgtacaatgaactgcagaaagataagatggcggaggcctacagtgagattgggatgaaaggcgagcgccggaggggcaaggggcacgatggcctttaccagggtctcagtacagccaccaaggacacctacgacgcccttcacatgcaggccctgccccctcgctaa

SEQ ID NO: 761 - DNA, 1527 bp, synthetic construct
  misc_feature 1..1527: note = 3A1e.BBZ (CD7 CAR)
  source 1..1527: mol_type = other DNA
atgctcgaggtgaaacagactttgaattttgaccttctcaagttggcgggagacgtggagtccaacccagggccgatggccttaccagtgaccgccttgctcctgccgctggccttgctgctccacgccgccaggccgcaggtgaaactgcaggagtccggcggcggtctggtcaaaccgggcggctccctgaagttgagctgtgcggcatccgggttcacattctcgtcatacgcaatgtcctgggtccgccagacccccgagaagcgcctcgaatgggtggccaccatctcctccggtggcagttatacgtactatccggactcggtgaagggccggttcaccatctctcgcgacaacgccaagaacactctgtacctccagatgtccagcctgcgctctgaagacacagcgatgtactactgcgcgcgccaggacggttattaccctggatggttcgccaattggggccagggcacgactgtgaccgtgagtagtggaggcggcgggtcaggcggcgggggctcggggggcggcggatcggacatcgagctgacacaatcgcccgctatcatgagtgcctcgctcggagaggagatcaccctgacttgttctgcctccagctccgtctcatacatgcactggtatcagcagaagagcggcacctcccccaagctcctcatctactccacaagcaacctggcgtccggggtgccgtcccgcttctctggctcgggctcaggaaccttctattcactcaccatctcttccgtggaggctgaagatgcagccgactactactgccatcagtggtcgtcgtacactttcggcggcgggaccaagctagagatcaagcgcaccacgacgccagcgccgcgaccaccaacaccggcgcccaccatcgcgtcgcagcccctgtccctgcgcccagaggcgtgccggccagcggcggggggcgcagtgcacacgagggggctggacttcgcctgtgatatctacatctgggcgcccttggccgggacttgtggggtccttctcctgtcactggttatcaccctttactgccggggcagaaagaaactcctgtatatattcaaacaaccatttatgagaccagtacaaactactcaagaggaagatggctgtagctgccgatttccagaagaagaagaaggaggatgtgaactgagagtgaagttcagcaggagcgcagacgcccccgcgtacaagcagggccagaaccagctctataacgagctcaatctaggacgaagagaggagtacgatgttttggacaagagacgtggccgggaccctgagatggggggaaagccgagaaggaagaaccctcaggaaggcctgtacaatgaactgcagaaagataagatggcggaggcctacagtgagattgggatgaaaggcgagcgccggaggggcaaggggcacgatggcctttaccagggtctcagtacagccaccaaggacacctacgacgcccttcacatgcaggccctgccccctcgctaa

SEQ ID NO: 762 - DNA, 810 bp, synthetic construct
  misc_feature 1..810: note = NY-ESO-1 TCR alpha
  source 1..810: mol_type = other DNA
atggagaccctgctcggggtctcactggtcatcctgtggctgcagctggccagggtgaactcgcagcagggggaggaggacccccaggccctgtccatccaggagggggagaatgccaccatgaattgcagttacaagacttccataaacaacctgcagtggtaccgccagaactccggccgcggcctggtgcacctgatcctcatccggtcgaatgaaagggaaaagcactcgggacgcctgcgagtgactctggacacgtccaagaagtcgtccagtctcttaatcaccgcctctcgcgcagccgataccgcatcgtacttctgtgcaaccgacggggcgggcaagagtacattcggcgacggcactaccctgaccgtgaagccaaatatccagaagcctgatccagctgtctatcagttgcgcgattccaaatcgtctgacaaatctgtgtgcctgttcaccgacttcgactcccagacgaacgtgtcccagagtaaagacagcgacgtgtacatcactgataagaccgtgctggacatgcgctccatggactttaaaagtaacagcgctgtagcgtggagcaacaagagtgacttcgcctgcgccaacgccttcaataactctatcatacctgccgataccttcttcccgagccccgaatccagttgcgacgtgaagctcgtggagaagagctttgagacagacaccaacctgaacttccaaaacctgtccgtcattggcttcaggatcctcctcctcaaggtggccggcttcaacttgctcatgacgctgagactctggagttca

SEQ ID NO: 763 - DNA, 927 bp, synthetic construct
  misc_feature 1..927: note = NY-ESO-1 beta
  source 1..927: mol_type = other DNA
atggactcgtggaccttatgctgcgtgtccctgtgcatactggttgccaagcacacagacgccggggtgatccagagcccccggcacgaagttaccgagatgggccaggaggtgacgctccgatgcaagcccatcagtggccacgattatctcttctggtaccgccaaaccatgatgcgcggcttggaactcctcatctacttcaacaacaacgtccccatcgatgactccggcatgcctgaggacaggttcagtgcgaagatgccgaatgcatccttctccaccctgaagatacagccgagtgagccccgcgactccgctgtgtacttctgcgcctctactatcggcgcccagcctcaacatttcggcgacggcacgcgcctcagtatcctggaggacctgaacaaggtgttccctccggaagtggctgtgtttgagccctccgaggcagaaatctcacacacacagaaggcaaccctcgtgtgtctggcaacaggtttcttcccagatcacgtggagctgagttggtgggtcaacggcaaggaggtccatagcggggtgagtaccgacccacagcctctcaaggagcagcctgccctcaacgacagtaggtactgcctgtcctcgcgcctccgcgtgtccgcaacgttctggcagaatccccgcaaccacttccggtgccaggtccaattctacggcctgagtgagaacgatgagtggacacaggatagggccaagcccgtgacccagatcgtgtccgccgaggcctggggccgcgctgactgcggcttcacctccgtgtcgtatcagcagggcgtattatcagccaccattctttacgaaatcctcctcggcaaggccacactatacgccgtgctggtgtcggcgctggtgttaatggcgatggtcaagcgaaaggatttctaa

SEQ ID NO: 764 - DNA, 1818 bp, synthetic construct
  misc_feature 1..1818: note = EBV16-E7 TCR
  source 1..1818: mol_type = other DNA
atgtggggcgtgttccttctctacgtgtcgatgaagatgggtggcaccacaggacagaatatcgaccagcccactgagatgaccgcaaccgagggagcgatcgtgcagatcaactgcacctaccagacatccgggttcaacgggctgttctggtaccagcagcacgcaggggaggcacctaccttcctgtcctacaatgttctggacggcctggaagagaaaggccgcttctcttcattcctcagtcgctcgaagggctactcctacttgctgctcaaggagttgcagatgaaggacagcgcgtcctacctctgcgcttccgtggacggcaacaaccgtctggcgttcggcaaaggcaaccaagtggtggtgatcccgaacatccagaatcccgacccggctgtttaccagctgagagactccaaatccagtgacaaatctgtgtgtctgttcaccgacttcgactcccaaaccaacgtgtctcagagtaaggactctgacgtgtatattacggataagtgcgtgctggacatgcgttcaatggacttcaaaagcaattccgccgtggcatggtccaacaagtcagacttcgcgtgtgcgaacgccttcaataactcaattatccccgaggataccttcttcccttccccagagagctcttgcgatgttaagctcgtcgagaagtcgttcgagactgataccaacctgaacttccagaacctgtcagtgatcggattccgtatactccttctgaaggtggccggcttcaacctgctgatgacactgagactgtggagcagtcgagcgaagcgcgagggaaggggcagtctgctcacctgcggcgacgtggaggagaaccccggccctatgggccccggactgctgtgctgggcactcctgtgcctgctcggggccggcctcgtcgatgctggcgtgacccagtcgcccacccacctaatcaagacgagaggacagcaagtgacgcttaggtgctccccgaagtcgggccacgatacagtgagctggtaccagcaggccctggggcagggcccccaattcatcttccaatactatgaggaggaagagcgccagcgaggcaacttccctgaccgattcagcgggcatcagttccctaattactcctcggagctcaatgtgaacgccctgctgctcggagactcggcactgtacctctgcgcttccagtctggggtggcggggcggaagatacaatgaacagttcttcgggccaggcacccgcttgaccgtgctggaggacctcaagaacgtgttccccccagaggtggctgtgttcgagccgtcggaggcggagatctcgcatacccagaaggctaccctggtgtgccttgctaccggattctatccggatcatgtggagctatcatggtgggtcaacgggaaggaggtgcactccggggtgtgcaccgatccacaacccctgaaggaacagcccgcactgaatgatagcaggtactgcctctccagtcgcctgcgggtgtcagcaacattctggcagaacccccgcaaccactttcgctgtcaggtgcaattttacggtctgtccgagaacgacgaatggactcaggaccgtgccaaacccgtgacacagatcgtgtccgcagaagcgtggggccgtgccgactgcgggttcaccagcgagtcctaccagcagggcgtgctgtctgccactatcttgtacgagatcctcctgggcaaggcaactctgtacgcagtactggtgtcggcgctggtcctgatggccatggtgaagcgtaaggactctcgcgggtaataataa

SEQ ID NO: 765 - DNA, 1821 bp, synthetic construct
  misc_feature 1..1821: note = H3.3K27M TCR
  source 1..1821: mol_type = other DNA
atgctgactgccagcctgttgagggcagtcatagcctccatctgtgttgtatccagcatggctcagaaggtaactcaagcgcagactgaaatttctgtggtggagaaggaggatgtgaccttggactgtgtgtatgaaacccgtgatactacttattacttattctggtacaagcaaccaccaagtggagaattggttttccttattcgtcggaactcttttgatgagcaaaatgaaataagtggtcggtattcttggaacttccagaaatccaccagttccttcaacttcaccatcacagcctcacaagtcgtggactcagcagtatacttctgtgctctgagtgaggagaatgacatgcgctttggagcagggaccagactgacagtaaaaccaaatatccagaaccctgaccctgccgtgtaccagctgagagactctaaatccagtgacaagtctgtctgcctattcaccgattttgattctcaaacaaatgtgtcacaaagtaaggattctgatgtgtatatcacagacaaaactgtcctagacatgaggtctatggacttcaagagcaacagtgctgtggcctggagcaacaaatctgactttgcatgtgcaaacgccttcaacaacagcattattccagaagacaccttcttccccagcccagaaagttcctgtgatgtcaagctggtcgagaaaagctttgaaacagatacgaacctaaactttcaaaacctgtcagtgattgggttccgaatcctcctcctgaaagtggccggatttaatctgctcatgacgctgcggctgtggtccagcgtgaaacagactttgaattttgaccttctcaagttggcgggagacgtggagtccaacccagggccgatgggcccccagctccttggctatgtggtcctttgccttctaggagcaggccccctggaagcccaagtgacccagaacccaagatacctcatcacagtgactggaaagaagttaacagtgacttgttctcagaatatgaaccatgagtatatgtcctggtatcgacaagacccagggctgggcttaaggcagatctactattcaatgaatgttgaggtgactgataagggagatgttcctgaagggtacaaagtctctcgaaaagagaagaggaatttccccctgatcctggagtcgcccaaccccaaccagacctctctgtacttctgtgccagcggctggggtggtccattctacgagcagtacttcgggccgggcaccaggctcacggtcacagaggacctgaaaaacgtgttcccacccgaggtcgctgtgtttgagccatcagaagcagagatctcccacacccaaaaggccacactggtatgcctggccacaggcttctaccccgaccacgtggagctgagctggtgggtgaatgggaaggaggtgcacagtggggtcagcacagacccgcagcccctcaaggagcagcccgccctcaacgactccagatactgcctgagcagccgcctgagggtctcggccaccttctggcagaacccccgcaaccacttccgctgtcaagtccagttctacgggctctcggagaacgacgagtggacccaggatagggccaaacccgtcacccagatcgtcagcgccgaggcctggggtagagcagactgtggcttcacctccgagtcttaccagcaaggggtcctgtctgccaccatcctctatgagatcttgctagggaaggccaccttgtatgccgtgctggtcagtgccctcgtgctgatggccatggtcaagagaaaggattccagaggctag

SEQ ID NO: 766 - DNA, 1605 bp, synthetic construct
  misc_feature 1..1605: note = CD19-CD3 BiTE
  source 1..1605: mol_type = other DNA
atgggatggagctgtatcatcctcttcttggtagcaacagctacaggtgtccactccgactacaaagatgatgacgataaggatatccagctgacccagtctccagcttctttggctgtgtctctagggcagagggccaccatctcctgcaaggccagccaaagtgttgattatgatggtgatagttatttgaactggtaccaacagattccaggacagccacccaaactcctcatctatgatgcatccaatctagtttctgggatcccacccaggtttagtggcagtgggtctgggacagacttcaccctcaacatccatcctgtggagaaggtggatgctgcaacctatcactgtcagcaaagtactgaggatccgtggacgttcggtggagggaccaagctcgagatcaaaggtggtggtggttctggcggcggcggctccggtggtggtggttctcaggtgcagctgcagcagtctggggctgagctggtgaggcctgggtcctcagtgaagatttcctgcaaggcttctggctatgcattcagtagctactggatgaactgggtgaagcagaggcctggacagggtcttgagtggattggacagatttggcctggagatggtgatactaactacaatggaaagttcaagggtaaagccactctgactgcagacgaatcctccagcacagcctacatgcaactcagcagcctagcatctgaggactctgcggtctatttctgtgcaagacgggagactacgacggtaggccgttattactatgctatggactactggggccaagggaccacggtcaccgtctcctccggaggtggtggatccgatatcaaactgcagcagtcaggggctgaactggcaagacctggggcctcagtgaagatgtcctgcaagacttctggctacacctttactaggtacacgatgcactgggtaaaacagaggcctggacagggtctggaatggattggatacattaatcctagccgtggttatactaattacaatcagaagttcaaggacaaggccacattgactacagacaaatcctccagcacagcctacatgcaactgagcagcctgacatctgaggactctgcggtctatttctgtgcaagatattatgatgatcattactgccttgactactggggccaaggcaccactctcacagtctcctcagtcgaaggtggaagtggaggttctggtggaagtggaggttcaggtggagtcgacgacgccgccattcagctgacccagtctccagcaatcatgtctgcatctccaggggagaaggtcaccatgacctgcagagccagttcaagtgtaagttacatgaactggtaccagcagaagtcaggcacctcccccaaaagatggatttatgacacatccaaagtggcttctggagtcccttatcgcttcagtggcagtgggtctgggacctcatactctctcacaatcagcagcatggaggctgaagatgctgccacttattactgccaacagtggagtagtaacccgctcacgttcggtgctgggaccaagctggagctgaaacatcatcaccatcatcattaataa

SEQ ID NO: 767 - DNA, 1569 bp, synthetic construct
  misc_feature 1..1569: note = 139-CD3 (EGFRvIII BiTE)
  source 1..1569: mol_type = other DNA
atgggctggagctgtatcattctgttcctggtggccacagccactggcgtgcattcggattacaaggatgacgatgacaaggatatccagatgacccagagtccatcgtccctgtccgcctcggtgggagaccgggtgaccatcacttgcagagcatcccaaggcatccgcaacaacctcgcctggtaccagcagaagcccggcaaggcccccaagaggctgatctatgcggcatccaacctgcagtccggcgtcccaagtcgcttcacaggctcgggttccggcacagagttcactttaatcgtgtcctcgctgcagccagaggactttgcaacatactactgcctgcagcaccactcgtatcccctgacctcgggcggcgggaccaaggtggagatcaagggaggtggcgggtctggtggcggaggttccggcggcgggggctccgaggtacaggtactcgagagtggtgggggcctggtgcagcccgggggctcccttagactctcgtgcgcggccagcggattcaccttcagttcctacgccatgtcatgggtgcgacaggcgcccggcaagggtctcgagtgggtatcggccatttcgggctccggcgggtcgaccaactacgccgatagtgtgaagggccgtttcaccatctcccgggacaacagtaagaacaccctctacctgcagatgaacagtctgagagcggaggacaccgcagtgtactactgcgccggctcctcggggtggtccgagtactggggccagggcaccctggtgactgtgtctagcggaggtggtggatccgatatcaaactgcagcagtcaggggctgaactggcaagacctggggcctcagtgaagatgtcctgcaagacttctggctacacctttactaggtacacgatgcactgggtaaaacagaggcctggacagggtctggaatggattggatacattaatcctagccgtggttatactaattacaatcagaagttcaaggacaaggccacattgactacagacaaatcctccagcacagcctacatgcaactgagcagcctgacatctgaggactctgcagtctattactgtgcaagatattatgatgatcattactgccttgactactggggccaaggcaccactctcacagtctcctcagtcgaaggtggaagtggaggttctggtggaagtggaggttcaggtggagtcgacgacgccgccattcagctgacccagtctccagcaatcatgtctgcatctccaggggagaaggtcaccatgacctgcagagccagttcaagtgtaagttacatgaactggtaccagcagaagtcaggcacctcccccaaaagatggatttatgacacatccaaagtggcttctggagtcccttatcgcttcagtggcagtgggtctgggacctcatactctctcacaatcagcagcatggaggctgaagatgctgccacttattactgccaacagtggagtagtaacccgctcacgttcggtgctgggaccaagctggagctgaaacatcatcaccatcatcattaataa

SEQ ID NO: 768 - protein, 277 aa, synthetic construct
  REGION 1..277: note = CD40
MVRLPLQCVLWGCLLTAVHPEPPTACREKQYLINSQCCSLCQPGQKLVSDCTEFTETECLPCGESEFLDTWNRETHCHQHKYCDPNLGLRVQQKGTSETDTICTCEEGWHCTSEACESCVLHRSCSPGFGVKQIATGVSDTICEPCPVGFFSNVSSAFEKCHPWTSCETKDLVVQQAGTNKTDVVCGPQDRLRALVVIPIIFGILFAILLVLVFIKKVAKKPTNKAPHPKQEPQEINFPDDLPGSNTAAPVQETLHGCQPVTQEDGKESRISVQERQ

SEQ ID NO: 769 - protein, 357 aa, synthetic construct
  REGION 1..357: note = RAP1
MAPRRVRSFLRGLPALLLLLLFLGPWPAASHGGKYSREKNQPKPSPKRESGEEFRMEKLNQLWEKAQRLHLPPVRLAELHADLKIQERDELAWKKLKLDGLDEDGEKEARLIRNLNVILAKYGLDGKKDARQVTSNSLSGTQEDGLDDPRLEKLWHKAKTSGKFSGEELDKLWREFLHHKEKVHEYNVLLETLSRTEEIHENVISPSDLSDIKGSVLHSRHTELKEKLRSINQGLDRLRRVSHQGYSTEAEFEEPRVIDLWDLAQSANLTDKELEAFREELKHFEAKIEKHNHYQKQLEIAHEKLRHAESVGDGERVSRSREKHALLEGRTKELGYTVKKHLQDLSGRISRARHNEL

SEQ ID NO: 770 - protein, 105 aa, synthetic construct
  REGION 1..105: note = RAP1 3
SRHTELKEKLRSINQGLDRLRRVSHQGYSTEAEFEEPRVIDLWDLAQSANLTDKELEAFREELKHFEAKIEKHNHYQKQLEIAHEKLRHAESVGDGERVSRSREK

SEQ ID NO: 771 - protein, 275 aa, synthetic construct
  REGION 1..275: note = ICAM2
MSSFGYRTLTVALFTLICCPGSDEKVFEVHVRPKKLAVEPKGSLEVNCSTTCNQPEVGGLETSLDKILLDEQAQWKHYLVSNISHDTVLQCHFTCSGKQESMNSNVSVYQPPRQVILTLQPTLVAVGKSFTIECRVPTVEPLDSLTLFLFRGNETLHYETFGKAAPAPQEATATFNSTADREDGHRNFSCLAVLDLMSRGGNIFHKHSAPKMLEIYEPVSDSQMVIIVTVVSVLLSLFVTSVLLCFIFGQHLRQQRMGTYGVRAAWRRLPQAFRP

SEQ ID NO: 772 - protein, 547 aa, synthetic construct
  REGION 1..547: note = ICAM3
MATMVPSVLWPRACWTLLVCCLLTPGVQGQEFLLRVEPQNPVLSAGGSLFVNCSTDCPSSEKIALETSLSKELVASGMGWAAFNLSNVTGNSRILCSVYCNGSQITGSSNITVYRLPERVELAPLPPWQPVGQNFTLRCQVEDGSPRTSLTVVLLRWEEELSRQPAVEEPAEVTATVLASRDDHGAPFSCRTELDMQPQGLGLFVNTSAPRQLRTFVLPVTPPRLVAPRFLEVETSWPVDCTLDGLFPASEAQVYLALGDQMLNATVMNHGDTLTATATATARADQEGAREIVCNVTLGGERREARENLTVFSFLGPIVNLSEPTAHEGSTVTVSCMAGARVQVTLDGVPAAAPGQPAQLQLNATESDDGRSFFCSATLEVDGEFLHRNSSVQLRVLYGPKIDRATCPQHLKWKDKTRHVLQCQARGNPYPELRCLKEGSSREVPVGIPFFVNVTHNGTYQCQASSSRGKYTLVVVMDIEAGSSHFVPVFVAVLLTLGVVTIVLALMYVFREHQRSGSYHVREESTYLPLTSMQPTEAMGEEPSRAE

SEQ ID NO: 773 - protein, 769 aa, synthetic construct
  REGION 1..769: note = CD18
MLGLRPPLLALVGLLSLGCVLSQECTKFKVSSCRECIESGPGCTWCQKLNFTGPGDPDSIRCDTRPQLLMRGCAADDIMDPTSLAETQEDHNGGQKQLSPQKVTLYLRPGQAAAFNVTFRRAKGYPIDLYYLMDLSYSMLDDLRNVKKLGGDLLRALNEITESGRIGFGSFVDKTVLPFVNTHPDKLRNPCPNKEKECQPPFAFRHVLKLTNNSNQFQTEVGKQLISGNLDAPEGGLDAMMQVAACPEEIGWRNVTRLLVFATDDGFHFAGDGKLGAILTPNDGRCHLEDNLYKRSNEFDYPSVGQLAHKLAENNIQPIFAVTSRMVKTYEKLTEIIPKSAVGELSEDSSNVVQLIKNAYNKLSSRVFLDHNALPDTLKVTYDSFCSNGVTHRNQPRGDCDGVQINVPITFQVKVTATECIQEQSFVIRALGFTDIVTVQVLPQCECRCRDQSRDRSLCHGKGFLECGICRCDTGYIGKNCECQTQGRSSQELEGSCRKDNNSIICSGLGDCVCGQCLCHTSDVPGKLIYGQYCECDTINCERYNGQVCGGPGRGLCFCGKCRCHPGFEGSACQCERTTEGCLNPRRVECSGRGRCRCNVCECHSGYQLPLCQECPGCPSPCGKYISCAECLKFEKGPFGKNCSAACPGLQLSNNPVKGRTCKERDSEGCWVAYTLEQQDGMDRYLIYVDESRECVAGPNIAAIVGGTVAGIVLIGILLLVIWKALIHLSDLREYRRFEKEKLKSQWNNDNPLFKSATTTVMNPKFAES

SEQ ID NO: 774 - protein, 468 aa, synthetic construct
  REGION 1..468: note = CEACAM1
MGHLSAPLHRVRVPWQGLLLTASLLTFWNPPTTAQLTTESMPFNVAEGKEVLLLVHNLPQQLFGYSWYKGERVDGNRQIVGYAIGTQQATPGPANSGRETIYPNASLLIQNVTQNDTGFYTLQVIKSDLVNEEATGQFHVYPELPKPSISSNNSNPVEDKDAVAFTCEPETQDTTYLWWINNQSLPVSPRLQLSNGNRTLTLLSVTRNDTGPYECEIQNPVSANRSDPVTLNVTYGPDTPTISPSDTYYRPGANLSLSCYAASNPPAQYSWLINGTFQQSTQELFIPNITVNNSGSYTCHANNSVTGCNRTTVKTIIVTELSPVVAKPQIKASKTTVTGDKDSVNLTCSTNDTGISIRWFFKNQSLPSSERMKLSQGNTTLSINPVKREDAGTYWCEVFNPISKNQSDPIMLNVNYNALPQENGLSPGAIAGIVIGVVALVALIAVALACFLHFGKTGRTTPMTHLTR

SEQ ID NO: 775 - protein, 164 aa, synthetic construct
  REGION 1..164: note = CD3zeta
MKWKALFTAAILQAQLPITEAQSFGLLDPKLCYLLDGILFIYGVILTALFLRVKFSRSADAPAYQQGQNQLYNELNLGRREEYDVLDKRRGRDPEMGGKPQRRKNPQEGLYNELQKDKMAEAYSEIGMKGERRRGKGHDGLYQGLSTATKDTYDALHMQALPPR

SEQ ID NO: 776 - protein, 86 aa, synthetic construct
  REGION 1..86: note = FcRgamma
MIPAVVLLLLLLVEQAAALGEPQLCYILDAILFLYGIVLTLLYCRLKIQVRKAAITSYEKSDGVYTGLSTRNQETYETLKHEKPPQ

SEQ ID NO: 777 - protein, 113 aa, synthetic construct
  REGION 1..113: note = DAP12
MGGLEPCSRLLLLPLLLAVSGLRPVQAQAQSDCSCSTVSPGVLAGIVMGDLVLTVLIALAVYFLGRLVPRGRGAAEAATRKQRITETESPYQELQGQRSDVYSDLNTQRPYYK

SEQ ID NO: 778 - protein, 235 aa, synthetic construct
  REGION 1..235: note = CD8
MALPVTALLLPLALLLHAARPSQFRVSPLDRTWNLGETVELKCQVLLSNPTSGCSWLFQPRGAAASPTFLLYLSQNKPKAAEGLDTQRFSGKRLGDTFVLTLSDFRRENEGYYFCSALSNSIMYFSHFVPVFLPAKPTTTPAPRPPTPAPTIASQPLSLRPEACRPAAGGAVHTRGLDFACDIYIWAPLAGTCGVLLLSLVITLYCNHRNRRRVCKCPRPVVKSGDKPSLSARYV

SEQ ID NO: 779 - protein, 458 aa, synthetic construct
  REGION 1..458: note = CD4
MNRGVPFRHLLLVLQLALLPAATQGKKVVLGKKGDTVELTCTASQKKSIQFHWKNSNQIKILGNQGSFLTKGPSKLNDRADSRRSLWDQGNFPLIIKNLKIEDSDTYICEVEDQKEEVQLLVFGLTANSDTHLLQGQSLTLTLESPPGSSPSVQCRSPRGKNIQGGKTLSVSQLELQDSGTWTCTVLQNQKKVEFKIDIVVLAFQKASSIVYKKEGEQVEFSFPLAFTVEKLTGSGELWWQAERASSSKSWITFDLKNKEVSVKRVTQDPKLQMGKKLPLHLTLPQALPQYAGSGNLTLALEAKTGKLHQEVNLVVMRATQLQKNLTCEVWGPTSPKLMLSLKLENKEAKVSKREKAVWVLNPEAGMWQCLLSDSGQVLLESNIKVLPTWSTPVQPMALIVLGGVAGLLLFIGLGIFFCVRCRHRRRQAERMSQIKRLLSEKKTCQCPHRFQKTCSPI

SEQ ID NO: 780 - protein, 250 aa, synthetic construct
  REGION 1..250: note = CD58
MVAGSDAGRALGVLSVVCLLHCFGFISCFSQQIYGVVYGNVTFHVPSNVPLKEVLWKKQKDKVAELENSEFRAFSSFKNRVYLDTVSGSLTIYNLTSSDEDEYEMESPNITDTMKFFLYVLESLPSPTLTCALTNGSIEVQCMIPEHYNSHRGLIMYSWDCPMEQCKRNSTSIYFKMENDLPQKIQCTLSNPLFNTTSSIILTTCIPSSGHSRHRYALIPIPLAVITTCIVLYMNGILKCDRKPDRTNSN

SEQ ID NO: 781 - protein, 193 aa, synthetic construct
  REGION 1..193: note = CD70
MPEEGSGCSVRRRPYGCVLRAALVPLVAGLVICLVVCIQRFAQAQQQLPLESLGWDVAELQLNHTGPQQDPRLYWQGGPALGRSFLHGPELDKGQLRIHRDGIYMVHIQVTLAICSSTTASRHHPTTLAVGICSPASRSISLLRLSFHQGCTIASQRLTPLARGDTLCTNLTGTLLPSRNTDETFFGVQWVRP

SEQ ID NO: 782 - protein, 205 aa, synthetic construct
  REGION 1..205: note = CD83
MSRGLQLLLLSCAYSLAPATPEVKVACSEDVDLPCTAPWDPQVPYTVSWVKLLEGGEERMETPQEDHLRGQHYHQKGQNGSFDAPNERPYSLKIRNTTSCNSGTYRCTLQDPDGQRNLSGKVILRVTGCPAQRKEETFKKYRAEIVLLLALVIFYLTLIIFTCKFARLQSIFPDFSKAGMERAFLPVTSPNKHLGLVTPHKTELV

SEQ ID NO: 783 - protein, 254 aa, synthetic construct
  REGION 1..254: note = CD137L
MEYASDASLDPEAPWPPAPRARACRVLPWALVAGLLLLLLLAAACAVFLACPWAVSGARASPGSAASPRLREGPELSPDDPAGLLDLRQGMFAQLVAQNVLLIDGPLSWYSDPGLAGVSLTGGLSYKEDTKELVVAKAGVYYVFFQLELRRVVAGEGSGSVSLALHLQPLRSAAGAAALALTVDLPPASSEARNSAFGFQGRLLHLSAGQRLGVHLHTEARARHAWQLTQGATVLGLFRVTPEIPAGLPSPRSE

SEQ ID NO: 784 - protein, 183 aa, synthetic construct
  REGION 1..183: note = CD252
MERVQPLEENVGNAARPRFERNKLLLVASVIQGLGLLLCFTYICLHFSALQVSHRYPRIQSIKVQFTEYKKEKGFILTSQKEDEIMKVQNNSVIINCDGFYLISLKGYFSQEVNISLHYQKDEEPLFQLKKVRSVNSLMVASLTYKDKVYLNVTTDNTSLDDFHVNGGELILIHQNPGEFCVL

SEQ ID NO: 785 - protein, 302 aa, synthetic construct
  REGION 1..302: note = CD275
MRLGSPGLLFLLFSSLRADTQEKEVRAMVGSDVELSCACPEGSRFDLNDVYVYWQTSESKTVVTYHIPQNSSLENVDSRYRNRALMSPAGMLRGDFSLRLFNVTPQDEQKFHCLVLSQSLGFQEVLSVEVTLHVAANFSVPVVSAPHSPSQDELTFTCTSINGYPRPNVYWINKTDNSLLDQALQNDTVFLNMRGLYDVVSVLRIARTPSVNIGCCIENVLLQQNLTVGSQTGNDIGERDKITENPVSTGEKNAATWSILAVLCLLVVVAVAIGWVCRDRCLQHSYAGAWAVSPETELTGHV

SEQ ID NO: 786 - protein, 532 aa, synthetic construct
  REGION 1..532: note = CD54
MAPSSPRPALPALLVLLGALFPGPGNAQTSVSPSKVILPRGGSVLVTCSTSCDQPKLLGIETPLPKKELLLPGNNRKVYELSNVQEDSQPMCYSNCPDGQSTAKTFLTVYWTPERVELAPLPSWQPVGKNLTLRCQVEGGAPRANLTVVLLRGEKELKREPAVGEPAEVTTTVLVRRDHHGANFSCRTELDLRPQGLELFENTSAPYQLQTFVLPATPPQLVSPRVLEVDTQGTVVCSLDGLFPVSEAQVHLALGDQRLNPTVTYGNDSFSAKASVSVTAEDEGTQRLTCAVILGNQSQETLQTVTIYSFPAPNVILTKPEVSEGTEVTVKCEAHPRAKVTLNGVPAQPLGPRAQLLLKATPEDNGRSFSCSATLEVAGQLIHKNQTRELRVLYGPRLDERDCPGNWTWPENSQQTPMCQAWGNPLPELKCLKDGTFPLPIGESVTVTRDLEGTYLCRARSTQGEVTRKVTVNVLSPRYEIVIITVVAAAVIMGTAGLSTYLYNRQRKIKKYRLQQAQKGTPMKPNTQATPP

SEQ ID NO: 787 - protein, 1179 aa, synthetic construct
  REGION 1..1179: note = CD49a
MAPRPRARPGVAVACCWLLTVVLRCCVSFNVDVKNSMTFSGPVEDMFGYTVQQYENEEGKWVLIGSPLVGQPKNRTGDVYKCPVGRGESLPCVKLDLPVNTSIPNVTEVKENMTFGSTLVTNPNGGFLACGPLYAYRCGHLHYTTGICSDVSPTFQVVNSIAPVQECSTQLDIVIVLDGSNSIYPWDSVTAFLNDLLERMDIGPKQTQVGIVQYGENVTHEFNLNKYSSTEEVLVAAKKIVQRGGRQTMTALGIDTARKEAFTEARGARRGVKKVMVIVTDGESHDNHRLKKVIQDCEDENIQRFSIAILGSYNRGNLSTEKFVEEIKSIASEPTEKHFFNVSDELALVTIVKTLGERIFALEATADQSAASFEMEMSQTGFSAHYSQDWVMLGAVGAYDWNGTVVMQKASQIIIPRNTTFNVESTKKNEPLASYLGYTVNSATASSGDVLYIAGQPRYNHTGQVIIYRMEDGNIKILQTLSGEQIGSYFGSILTTTDIDKDSNTDILLVGAPMYMGTEKEEQGKVYVYALNQTRFEYQMSLEPIKQTCCSSRQHNSCTTENKNEPCGARFGTAIAAVKDLNLDGFNDIVIGAPLEDDHGGAVYIYHGSGKTIRKEYAQRIPSGGDGKTLKFFGQSIHGEMDLNGDGLTDVTIGGLGGAALFWSRDVAVVKVTMNFEPNKVNIQKKNCHMEGKETVCINATVCFDVKLKSKEDTIYEADLQYRVTLDSLRQISRSFFSGTQERKVQRNITVRKSECTKHSFYMLDKHDFQDSVRITLDFNLTDPENGPVLDDSLPNSVHEYIPFAKDCGNKEKCISDLSLHVATTEKDLLIVRSQNDKFNVSLTVKNTKDSAYNTRTIVHYSPNLVFSGIEAIQKDSCESNHNITCKVGYPFLRRGEMVTFKILFQFNTSYLMENVTIYLSATSDSEEPPETLSDNVVNISIPVKYEVGLQFYSSASEYHISIAANETVPEVINSTEDIGNEINIFYLIRKSGSFPMPELKLSISFPNMTSNGYPVLYPTGLSSSENANCRPHIFEDPFSINSGKKMTTSTDHLKRGTILDCNTCKFATITCNLTSSDISQVNVSLILWKPTFIKSYFSSLNLTIRGELRSENASLVLSSSNQKRELAIQISKDGLPGRVPLWVILLSAFAGLLLLMLLILALWKIGFFKRPLKKKMEK

SEQ ID NO: 788 - protein, 538 aa, synthetic construct
  REGION 1..538: note = CD112
MARAAALLPSRSPPTPLLWPLLLLLLLETGAQDVRVQVLPEVRGQLGGTVELPCHLLPPVPGLYISLVTWQRPDAPANHQNVAAFHPKMGPSFPSPKPGSERLSFVSAKQSTGQDTEAELQDATLALHGLTVEDEGNYTCEFATFPKGSVRGMTWLRVIAKPKNQAEAQKVTFSQDPTTVALCISKEGRPPARISWLSSLDWEAKETQVSGTLAGTVTVTSRFTLVPSGRADGVTVTCKVEHESFEEPALIPVTLSVRYPPEVSISGYDDNWYLGRTDATLSCDVRSNPEPTGYDWSTTSGTFPTSAVAQGSQLVIHAVDSLFNTTFVCTVTNAVGMGRAEQVIFVRETPNTAGAGATGGIIGGIIAAIIATAVAATGILICRQQRKEQTLQGAEEDEDLEGPPSYKPPTPKAKLEAQEMPSQLFTLGASEHSPLKTPYFDAGASCTEQEMPRYHELPTLEERSGPLHPGATSLGSPIPVPPGPPAVEDVSLDLEDEEGEEEEEYLDKINPIYDALSYSSPSDSYQGKGFVMSRAMYV

SEQ ID NO: 789 - protein, 335 aa, synthetic construct
  REGION 1..335: note = CD150
MDPKGLLSLTFVLFLSLAFGASYGTGGRMMNCPKILRQLGSKVLLPLTYERINKSMNKSIHIVVTMAKSLENSVENKIVSLDPSEAGPPRYLGDRYKFYLENLTLGIRESRKEDEGWYLMTLEKNVSVQRFCLQLRLYEQVSTPEIKVLNKTQENGTCTLILGCTVEKGDHVAYSWSEKAGTHPLNPANSSHLLSLTLGPQHADNIYICTVSNPISNNSQTFSPWPGCRTDPSETKPWAVYAGLLGGVIMILIMVVILQLRRRGKTNHYQTTVEKKSLTIYAQVQKPGPLQKKLDSFPAQDPCTTIYVAATEPVPESVQETNSITVYASVTLPES

SEQ ID NO: 790 - protein, 417 aa, synthetic construct
  REGION 1..417: note = CD155
MARAMAAAWPLLLVALLVLSWPPPGTGDVVVQAPTQVPGFLGDSVTLPCYLQVPNMEVTHVSQLTWARHGESGSMAVFHQTQGPSYSESKRLEFVAARLGAELRNASLRMFGLRVEDEGNYTCLFVTFPQGSRSVDIWLRVLAKPQNTAEVQKVQLTGEPVPMARCVSTGGRPPAQITWHSDLGGMPNTSQVPGFLSGTVTVTSLWILVPSSQVDGKNVTCKVEHESFEKPQLLTVNLTVYYPPEVSISGYDNNWYLGQNEATLTCDARSNPEPTGYNWSTTMGPLPPFAVAQGAQLLIRPVDKPINTTLICNVTNALGARQAELTVQVKEGPPSEHSGMSRNAIIFLVLGILVFLILLGIGIYFYWSKCSREVLWHCHLCPSSTEHASASANGHVSYSAVSRENSSSQDPQTEGTR

SEQ ID NO: 791 - protein, 616 aa, synthetic construct
  REGION 1..616: note = CD265
MAPRARRRRPLFALLLLCALLARLQVALQIAPPCTSEKHYEHLGRCCNKCEPGKYMSSKCTTTSDSVCLPCGPDEYLDSWNEEDKCLLHKVCDTGKALVAVVAGNSTTPRRCACTAGYHWSQDCECCRRNTECAPGLGAQHPLQLNKDTVCKPCLAGYFSDAFSSTDKCRPWTNCTFLGKRVEHHGTEKSDAVCSSSLPARKPPNEPHVYLPGLIILLLFASVALVAAIIFGVCYRKKGKALTANLWHWINEACGRLSGDKESSGDSCVSTHTANFGQQGACEGVLLLTLEEKTFPEDMCYPDQGGVCQGTCVGGGPYAQGEDARMLSLVSKTEIEEDSFRQMPTEDEYMDRPSQPTDQLLFLTEPGSKSTPPFSEPLEVGENDSLSQCFTGTQSTVGSESCNCTEPLCRTDWTPMSSENYLQKEVDSGHCPHWAASPSPNWADVCTGCRNPPGEDCEPLVGSPKRGPLPQCAYGMGLPPEEEASRTEARDQPEDGADGRLPSSARAGAGSGSSPGGQSPASGNVTGNSNSTFISSGQVMNFKGDIIVVYVSQTSQEGAAAAAEPMGRPVQEETLARRDSFAGNGPRFPDPCGGPEGLREPEKASRPVQEQGGAKA

SEQ ID NO: 792 - protein, 283 aa, synthetic construct
  REGION 1..283: note = CD270
MEPPGDWGPPPWRSTPKTDVLRLVLYLTFLGAPCYAPALPSCKEDEYPVGSECCPKCSPGYRVKEACGELTGTVCEPCPPGTYIAHLNGLSKCLQCQMCDPAMGLRASRNCSRTENAVCGCSPGHFCIVQDGDHCAACRAYATSSPGQRVQKGGTESQDTLCQNCPPGTFSPNGTLEECQHQTKCSWLVTKAGAGTSSSHWVWWFLSGSLVIVIVCSTVGLIICVKRRKPRGDVVKVIVSVQRKRQEAEGEATVIEALQAPPDVTTVAVEETIPSFTGRSPNH

SEQ ID NO: 793 - protein, 251 aa, synthetic construct
  REGION 1..251: note = TL1A
MAEDLGLSFGETASVEMLPEHGSCRPKARSSSARWALTCCLVLLPFLAGLTTYLLVSQLRAQGEACVQFQALKGQEFAPSHQQVYAPLRADGDKPRAHLTVVRQTPTQHFKNQFPALHWEHELGLAFTKNRMNYTNKFLLIPESGDYFIYSQVTFRGMTSECSEIRQAGRPNKPDSITVVITKVTDSYPEPTQLLMGTKSVCEVGSNWFQPIYLGAMFSLQEGDKLMVNVSDISLVDYTKEDKTFFGAFLL

SEQ ID NO: 794 - protein, 459 aa, synthetic construct
  REGION 1..459: note = CD127
MTILGTTFGMVFSLLQVVSGESGYAQNGDLEDAELDDYSFSCYSQLEVNGSQHSLTCAFEDPDVNITNLEFEICGALVEVKCLNFRKLQEIYFIETKKFLLIGKSNICVKVGEKSLTCKKIDLTTIVKPEAPFDLSVVYREGANDFVVTFNTSHLQKKYVKVLMHDVAYRQEKDENKWTHVNLSSTKLTLLQRKLQPAAMYEIKVRSIPDHYFKGFWSEWSPSYYFRTPEINNSSGEMDPILLTISILSFFSVALLVILACVLWKKRIKPIVWPSLPDHKKTLEHLCKKPRKNLNVSFNPESFLDCQIHRVDDIQARDEVEGFLQDTFPQQLEESEKQRLGGDVQSPNCPSEDVVITPESFGRDSSLTCLAGNVSACDAPILSSSRSLDCRESGKNGPHVYQDLLLSLGTTNSTLPPPFSLQSGILTLNPVAQGQPILTSLGSNQEEAYVTMSSFYQNQ

SEQ ID NO: 795 - protein, 825 aa, synthetic construct
  REGION 1..825: note = IL-4R
MGWLCSGLLFPVSCLVLLQVASSGNMKVLQEPTCVSDYMSISTCEWKMNGPTNCSTELRLLYQLVFLLSEAHTCIPENNGGAGCVCHLLMDDVVSADNYTLDLWAGQQLLWKGSFKPSEHVKPRAPGNLTVHTNVSDTLLLTWSNPYPPDNYLYNHLTYAVNIWSENDPADFRIYNVTYLEPSLRIAASTLKSGISYRARVRAWAQCYNTTWSEWSPSTKWHNSYREPFEQHLLLGVSVSCIVILAVCLLCYVSITKIKKEWWDQIPNPARSRLVAIIIQDAQGSQWEKRSRGQEPAKCPHWKNCLTKLLPCFLEHNMKRDEDPHKAAKEMPFQGSGKSAWCPVEISKTVLWPESISVVRCVELFEAPVECEEEEEVEEEKGSFCASPESSRDDFQEGREGIVARLTESLFLDLLGEENGGFCQQDMGESCLLPPSGSTSAHMPWDEFPSAGPKEAPPWGKEQPLHLEPSPPASPTQSPDNLTCTETPLVIAGNPAYRSFSNSLSQSPCPRELGPDPLLARHLEEVEPEMPCVPQLSEPTTVPQPEPETWEQILRRNVLQHGAAAAPVSAPTSGYQEFVHAVEQGGTQASAVVGLGPPGEAGYKAFSSLLASSAVSPEKCGFGASSGEEGYKPFQDLIPGCPGDPAPVPVPLFTFGLDREPPRSPQSSHLPSSSPEHLGLEPGEKVEDMPKPPLPQEQATDPLVDSLGSGIVYSALTCHLCGHLKQCHGQEDGGQTPVMASPCCGCCCGDRSSPPTTPLRAPDPSPGGVPLEASLCPASLAPSGISEKSKSSSSFHPAPGNAQSSSQTPKIVNFVSVGPTYMRVS

SEQ ID NO: 796 - protein, 199 aa, synthetic construct
  REGION 1..199: note = GITR-L
MTLHPSPITCEFLFSTALISPKMCLSHLENMPLSHSRTQGAQRSSWKLWLFCSIVMLLFLCSFSWLIFIFLQLETAKEPCMAKFGPLPSKWQMASSEPPCVNKVSDWKLEILQNGLYLIYGQVAPNANYNDVAPFEVRLYKNKDMIQTLTNKSKIQNVGGTYELHVGDTIDLIFNSEHQVLKNNTYWGIILLANPQFIS

SEQ ID NO: 797 - protein, 378 aa, synthetic construct
  REGION 1..378: note = TIM-4
MSKEPLILWLMIEFWWLYLTPVTSETVVTEVLGHRVTLPCLYSSWSHNSNSMCWGKDQCPYSGCKEALIRTDGMRVTSRKSAKYRLQGTIPRGDVSLTILNPSESDSGVYCCRIEVPGWFNDVKINVRLNLQRASTTTHRTATTTTRRTTTTSPTTTRQMTTTPAALPTTVVTTPDLTTGTPLQMTTIAVFTTANTCLSLTPSTLPEEATGLLTPEPSKEGPILTAESETVLPSDSWSSVESTSADTVLLTSKESKVWDLPSTSHVSMWKTSDSVSSPQPGASDTAVPEQNKTTKTGQMDGIPMSMKNEMPISQLLMIIAPSLGFVLFALFVAFLLRGKLMETYCSQKHTRLDYIGDSKNVLNDVQHGREDEDGLFTL

SEQ ID NO: 798 - protein, 234 aa, synthetic construct
  REGION 1..234: note = CD153
MDPGLQQALNGMAPPGDTAMHVPAGSVASHLGTTSRSYFYLTTATLALCLVFTVATIMVLVVQRTDSIPNSPDNVPLKGGNCSEDLLCILKRAPFKKSWAYLQVAKHLNKTKLSWNKDGILHGVRYQDGNLVIQFPGLYFIICQLQFLVQCPNNSVDLKLELLINKHIKKQALVTVCESGMQTKHVYQNLSQFLLDYLQVNTTISVNVDTFQYIDTSTFPLENVLSIFLYSNSD

SEQ ID NO: 799 - protein, 325 aa, synthetic construct [sequence omitted]

SEQ ID NO: 800 - protein, 742 aa, synthetic construct
  REGION 1..742: note = CD44
MDKFWWHAAWGLCLVPLSLAQIDLNITCRFAGVFHVEKNGRYSISRTEAADLCKAFNSTLPTMAQMEKALSIGFETCRYGFIEGHVVIPRIHPNSICAANNTGVYILTSNTSQYDTYCFNASAPPEEDCTSVTDLPNAFDGPITITIVNRDGTRYVQKGEYRTNPEDIYPSNPTDDDVSSGSSSERSSTSGGYIFYTFSTVHPIPDEDSPWITDSTDRIPATTLMSTSATATETATKRQETWDWFSWLFLPSESKNHLHTTTQMAGTSSNTISAGWEPNEENEDERDRHLSFSGSGIDDDEDFISSTISTTPRAFDHTKQNQDWTQWNPSHSNPEVLLQTTTRMTDVDRNGTTAYEGNWNPEAHPPLIHHEHHEEEETPHSTSTIQATPSSTTEETATQKEQWFGNRWHEGYRQTPKEDSHSTTGTAAASAHTSHPMQGRTTPSPEDSSWTDFFNPISHPMGRGHQAGRRMDMDSSHSITLQPTANPNTGLVEDLDRTGPLSMTTQQSNSQSFSTSHEGLEEDKDHPTTSTLTSSNRNDVTGGRRDPNHSEGSTTLLEGYTSHYPHTKESRTFIPVTSAKTGSFGVTAVTVGDSNSNVNRSLSGDQDTFHPSGGSHTTHGSESDGHSHGSQEGGANTTSGPIRTPQIPEWLIILASLLALALILAVCIAVNSRRRCGQKKKLVINSGNGAVEDRKPSGLNGEASKSQEMVHLVNKESSETPDQFMTADETRNLQNVDMKIGV

SEQ ID NO: 801 - protein, 595 aa, synthetic construct
  REGION 1..595: note = TriCD40L_8-28 AA
MALPVTALLLPLALLLHAARPNPQIAAHVISEASSKTTSVLQWAEKGYYTMSNNLVTLENGKQLTVKRQGLYYIYAQVTFCSNREASSQAPFIASLCLKSPGRFERILLRAANTHSSAKPCGQQSIHLGGVFELQPGASVFVNVTDPSQVSHGTGFTSFGLLKLGGGGSGGGSNPQIAAHVISEASSKTTSVLQWAEKGYYTMSNNLVTLENGKQLTVKRQGLYYIYAQVTFCSNREASSQAPFIASLCLKSPGRFERILLRAANTHSSAKPCGQQSIHLGGVFELQPGASVFVNVTDPSQVSHGTGFTSFGLLKLGGGGSGGGSNPQIAAHVISEASSKTTSVLQWAEKGYYTMSNNLVTLENGKQLTVKRQGLYYIYAQVTFCSNREASSQAPFIASLCLKSPGRFERILLRAANTHSSAKPCGQQSIHLGGVFELQPGASVFVNVTDPSQVSHGTGFTSFGLLKLGSGGGGSGGGGSGGGGSTTTPAPRPPTPAPTIASQPLSLRPEACRPAAGGAVHTRGLDFACDIYIWAPLAGTCGVLLLSLVITLYCRSKRSRLLHSDYMNMTPRRPGPTRKHYQPYAPPRDFAAYRS

SEQ ID NO: 802 - DNA, 1788 bp, synthetic construct
  misc_feature 1..1788: note = TriCD40L_8-28 NT
  source 1..1788: mol_type = other DNA
atggccttaccagtgaccgccttgctcctgccgctggccttgctgctccacgccgccaggccgaatcctcaaattgcggcacatgtcataagtgaggccagcagtaaaacaacatctgtgttacagtgggctgaaaaaggatactacaccatgagcaacaacttggtaaccctggaaaatgggaaacagctgaccgttaaaagacaaggactctattatatctatgcccaagtcaccttctgttccaatcgggaagcttcgagtcaagctccatttatagccagcctctgcctaaagtcccccggtagattcgagagaatcttactcagagctgcaaatacccacagttccgccaaaccttgcgggcaacaatccattcacttgggaggagtatttgaattgcaaccaggtgcttcggtgtttgtcaatgtgactgatccaagccaagtgagccatggcactggcttcacgtcctttggcttactcaaactcggcgggggcggttctgggggtggcagtaatccccagatcgccgcacacgtgatctccgaggctagctctaagaccaccagtgtgctgcagtgggccgaaaagggatactatacaatgagcaataacctggtgacactggagaacggcaaacagctcaccgtgaagaggcaaggtctgtactacatctacgctcaggtcaccttctgcagcaatcgagaagcaagtagtcaggcgcccttcattgccagtttatgtctaaagagcccaggccgctttgagcgtatcctcctccgcgccgctaatacgcactccagcgcaaaaccctgtggccagcagtcaatccacctcggcggggtgttcgaactgcaacctggcgcttccgtgttcgtgaatgtgaccgatccctcacaggtcagccacggcacgggcttcacctcgttcgggctgctgaagctggggggcggcggcagtggcggggggagtaacccccagatcgccgcacacgtgattagtgaggcgtcctccaagacaacctccgtgctgcagtgggccgagaagggctactacaccatgagtaacaacctcgtaaccctggagaacggaaagcagttaaccgtcaagcgccagggcctgtactacatctacgcgcaggtcacattctgctcaaacagggaggcctcgtcccaggccccctttatcgcttccctgtgcctgaagtctccgggacgcttcgaacgaatcctgctgcgtgcggccaacacgcactcgtccgccaaaccgtgtggccagcagtccatacacctcggcggcgtgttcgagctgcaacctggcgccagcgtgttcgtgaacgtgacagacccctcccaggtctcccacgggacaggttttaccagtttcggcctgcttaagctcggatccgggggcggcggttccggcggggggggctctgggggcggcggctccaccacgacgccagcgccgcgaccaccaacaccggcgcccaccatcgcgtcgcagcccctgtccctgcgcccagaggcgtgccggccagcggcggggggcgcagtgcacacgagggggctggacttcgcctgtgatatctacatctgggcgcccttggccgggacttgtggggtccttctcctgtcactggttatcaccctttactgcaggagtaagaggagcaggctcctgcacagtgactacatgaacatgactccccgccgccccgggcccacccgcaagcattaccagccctatgccccaccacgcgacttcgcagcctatcgctcctaa

SEQ ID NO: 803 - protein, 592 aa, synthetic construct
  REGION 1..592: note = TriCD40L_28-28 AA
MALPVTALLLPLALLLHAARPNPQIAAHVISEASSKTTSVLQWAEKGYYTMSNNLVTLENGKQLTVKRQGLYYIYAQVTFCSNREASSQAPFIASLCLKSPGRFERILLRAANTHSSAKPCGQQSIHLGGVFELQPGASVFVNVTDPSQVSHGTGFTSFGLLKLGGGGSGGGSNPQIAAHVISEASSKTTSVLQWAEKGYYTMSNNLVTLENGKQLTVKRQGLYYIYAQVTFCSNREASSQAPFIASLCLKSPGRFERILLRAANTHSSAKPCGQQSIHLGGVFELQPGASVFVNVTDPSQVSHGTGFTSFGLLKLGGGGSGGGSNPQIAAHVISEASSKTTSVLQWAEKGYYTMSNNLVTLENGKQLTVKRQGLYYIYAQVTFCSNREASSQAPFIASLCLKSPGRFERILLRAANTHSSAKPCGQQSIHLGGVFELQPGASVFVNVTDPSQVSHGTGFTSFGLLKLGSGGGGSGGGGSGGGGSIEVMYPPPYLDNEKSNGTIIHVKGKHLCPSPLFPGPSKPFWVLVVVGGVLACYSLLVTVAFIIFWVRSKRSRLLHSDYMNMTPRRPGPTRKHYQPYAPPRDFAAYRS

SEQ ID NO: 804 - DNA, 1779 bp, synthetic construct
  misc_feature 1..1779: note = TriCD40L_28-28 NT
  source 1..1779: mol_type = other DNA
atggccttaccagtgaccgccttgctcctgccgctggccttgctgctccacgccgccaggccgaatcctcaaattgcggcacatgtcataagtgaggccagcagtaaaacaacatctgtgttacagtgggctgaaaaaggatactacaccatgagcaacaacttggtaaccctggaaaatgggaaacagctgaccgttaaaagacaaggactctattatatctatgcccaagtcaccttctgttccaatcgggaagcttcgagtcaagctccatttatagccagcctctgcctaaagtcccccggtagattcgagagaatcttactcagagctgcaaatacccacagttccgccaaaccttgcgggcaacaatccattcacttgggaggagtatttgaattgcaaccaggtgcttcggtgtttgtcaatgtgactgatccaagccaagtgagccatggcactggcttcacgtcctttggcttactcaaactcggcgggggcggttctgggggtggcagtaatccccagatcgccgcacacgtgatctccgaggctagctctaagaccaccagtgtgctgcagtgggccgaaaagggatactatacaatgagcaataacctggtgacactggagaacggcaaacagctcaccgtgaagaggcaaggtctgtactacatctacgctcaggtcaccttctgcagcaatcgagaagcaagtagtcaggcgcccttcattgccagtttatgtctaaagagcccaggccgctttgagcgtatcctcctccgcgccgctaatacgcactccagcgcaaaaccctgtggccagcagtcaatccacctcggcggggtgttcgaactgcaacctggcgcttccgtgttcgtgaatgtgaccgatccctcacaggtcagccacggcacgggcttcacctcgttcgggctgctgaagctggggggcggcggcagtggcggggggagtaacccccagatcgccgcacacgtgattagtgaggcgtcctccaagacaacctccgtgctgcagtgggccgagaagggctactacaccatgagtaacaacctcgtaaccctggagaacggaaagcagttaaccgtcaagcgccagggcctgtactacatctacgcgcaggtcacattctgctcaaacagggaggcctcgtcccaggccccctttatcgcttccctgtgcctgaagtctccgggacgcttcgaacgaatcctgctgcgtgcggccaacacgcactcgtccgccaaaccgtgtggccagcagtccatacacctcggcggcgtgttcgagctgcaacctggcgccagcgtgttcgtgaacgtgacagacccctcccaggtctcccacgggacaggttttaccagtttcggcctgcttaagctcggatccgggggcggcggttccggcggggggggctctgggggcggcggctccattgaagttatgtatcctcctccttacctagacaatgagaagagcaatggaaccattatccatgtgaaagggaaacacctttgtccaagtcccctatttcccggaccttctaagcccttttgggtgctggtggtggttggtggagtcctggcttgctatagcttgctagtaacagtggcctttattattttctgggtgaggagtaagaggagcaggctcctgcacagtgactacatgaacatgactccccgccgccccgggcccacccgcaagcattaccagccctatgccccaccacgcgacttcgcagcctatcgctcctaa

SEQ ID NO: 805 - protein, 372 aa, synthetic construct
  REGION 1..372: note = CD27 CAR
MARPHPWWLCVLGTLVGLSATPAPKSCPERHYWAQGKLCCQMCEPGTFLVKDCDQHRKAAQCDPCIPGVSFSPDHHTRPHCESCRHCNSGLLVRNCTITANAECACRNGWQCRDKECTECDPLPNPSLTARSSQALSPHPQPTHLPYVSEMLEARTAGHMQTLADFRQLPARTLSTHWPPQRSLCSSDFIRILVIFSGMFLVFTLAGALFLHQRRKYRSNKGESPVEPAEPCRYSCPREEEGSTIPIQEDYRKPEPACSPRVKFSRSADAPAYQQGQNQLYNELNLGRREEYDVLDKRRGRDPEMGGKPRRKNPQEGLYNELQKDKMAEAYSEIGMKGERRRGKGHDGLYQGLSTATKDTYDALHMQALPPR

SEQ ID NO: 806 - protein, 771 aa, synthetic construct
  REGION 1..771: note = A40C28 - CD27 CAR
MALPVTALLLPLALLLHAARPQVQLVQSGAEVKKPGASVKVSCTASGFNIKDYYVHWVKQAPGQGLEWMGRIDPEDGDSKYAPKFQGKATMTADTSTSTVYMELSSLRSEDTAVYYCTTSYYVGTYGYWGQGTLVTVSSGGGGSGGGGSGGGGSDIQMTQSPSSLSASVGDRVTITCSASSSVSYMLWFQQKPGKAPKLLIYSTSNLASGVPSRFSGSGSGTDFTLTISSLQPEDFATYYCQQRTFYPYTFGGGTKVEIKRTASTTTPAPRPPTPAPTIASQPLSLRPEACRPAAGGAVHTRGLDFACDFWVLVVVGGVLACYSLLVTVAFIIFWVRSKRSRLLHSDYMNMTPRRPGPTRKHYQPYAPPRDFAAYRSVKQTLNFDLLKLAGDVESNPGPMARPHPWWLCVLGTLVGLSATPAPKSCPERHYWAQGKLCCQMCEPGTFLVKDCDQHRKAAQCDPCIPGVSFSPDHHTRPHCESCRHCNSGLLVRNCTITANAECACRNGWQCRDKECTECDPLPNPSLTARSSQALSPHPQPTHLPYVSEMLEARTAGHMQTLADFRQLPARTLSTHWPPQRSLCSSDFIRILVIFSGMFLVFTLAGALFLHQRRKYRSNKGESPVEPAEPCRYSCPREEEGSTIPIQEDYRKPEPACSPRVKFSRSADAPAYQQGQNQLYNELNLGRREEYDVLDKRRGRDPEMGGKPRRKNPQEGLYNELQKDKMAEAYSEIGMKGERRRGKGHDGLYQGLSTATKDTYDALHMQALPPR

SEQ ID NO: 807 - protein, 486 aa, synthetic construct; identical to SEQ ID NO: 256
  REGION 1..486: note = BCMA CAR (BCMA31)

SEQ ID NO: 808 - protein, 885 aa, synthetic construct; identical to SEQ ID NO: 601
  REGION 1..885: note = A40C.28-BCMA31.BBZ

SEQ ID NO: 809 - protein, 885 aa, synthetic construct; identical to SEQ ID NO: 602
  REGION 1..885: note = BCMA31.BBZ-A40C.28

SEQ ID NO: 810 - protein, 485 aa, synthetic construct; identical to SEQ ID NO: 135
  REGION 1..485: note = CAR (M12)

SEQ ID NO: 811 - protein, 486 aa, synthetic construct; identical to SEQ ID NO: 144
  REGION 1..486: note = CAR (M32)

SEQ ID NO: 812 - protein, 884 aa, synthetic construct
  REGION 1..884: note = CAR+LACO (A40C28+M12)
MALPVTALLLPLALLLHAARPQVQLVQSGAEVKKPGASVKVSCTASGFNIKDYYVHWVKQAPGQGLEWMGRIDPEDGDSKYAPKFQGKATMTADTSTSTVYMELSSLRSEDTAVYYCTTSYYVGTYGYWGQGTLVTVSSGGGGSGGGGSGGGGSDIQMTQSPSSLSASVGDRVTITCSASSSVSYMLWFQQKPGKAPKLLIYSTSNLASGVPSRFSGSGSGTDFTLTISSLQPEDFATYYCQQRTFYPYTFGGGTKVEIKRTASTTTPAPRPPTPAPTIASQPLSLRPEACRPAAGGAVHTRGLDFACDFWVLVVVGGVLACYSLLVTVAFIIFWVRSKRSRLLHSDYMNMTPRRPGPTRKHYQPYAPPRDFAAYRSVKQTLNFDLLKLAGDVESNPGPMALPVTALLLPLALLLHAARPAIRLTQSPSLLSASVGDRVTVTCRASQGGGNYLAWYQQKPGKAPKLLIYGASKLQSGVPSRFSGSGSGTEFTLTISSLQPEDFATYYCQQLNSYPVTFGQGTKVDIKGGGGSGGGGSGGGGSEVQLVESGAEVKKPGASVKVSCKASGYTFTTYYIHWVRQAPGQGLEWMGIINPSSGSTTYTQKFQGRVTMTRDTSTSTVYIELSGLRSEDTAVYYCARGETLRGYFDYWGQGTLVTVSSTTTPAPRPPTPAPTIASQPLSLRPEACRPAAGGAVHTRGLDFACDIYIWAPLAGTCGVLLLSLVITLYCKRGRKKLLYIFKQPFMRPVQTTQEEDGCSCRFPEEEEGGCELRVKFSRSADAPAYKQGQNQLYNELNLGRREEYDVLDKRRGRDPEMGGKPRRKNPQEGLYNELQKDKMAEAYSEIGMKGERRRGKGHDGLYQGLSTATKDTYDALHMQALPPR

SEQ ID NO: 813 - protein, 519 aa, synthetic construct
  REGION 1..519: note = 1412-4D11 (-CD28/-CD40 )
MALPVTALLLPLALLLHAARPQVQLVQSGAEVKKPGASVKVSCKASGYTFTSYYIHWVRQAPGQGLEWIGCIYPGNVNTNYNEKFKDRATLTVDTSISTAYMELSRLRSDDTAVYFCTRSHYGLDWNFDVWGQGTTVTVSSVEGGSGGSGGSGGSGGVMDDIQMTQSPSSLSASVGDRVTITCHASQNIYVWLNWYQQKPGKAPKLLIYKASNLHTGVPSRFSGSGSGTDFTLTISSLQPEDFATYYCQQGQTYPYTFGGGTKVEIKGGGGSPQLQLQESGPGLLKPSETLSLTCTVSGGSISSPGYYGGWIRQPPGKGLEWIGSIYKSGSTYHNPSLKSRVTISVDTSKNQFSLKLSSVTAADTAVYYCTRPVVRYFGWFDPWGQGTLVTVSSASGGGGSGGGGSGGGGSAIQLTQSPSSLSASVGDRVTITCRASQGISSALAWYQQKPGKAPKLLIYDASNLESGVPSRFSGSGSGTDFTLTISSLQPEDFATYYCQQFNSYPTFGQGTKVEIKRT

SEQ ID NO: 814 - protein, 491 aa, synthetic construct; identical to SEQ ID NO: 494
  REGION 1..491: note = CD123 CAR (C5)

SEQ ID NO: 815 - protein, 495 aa, synthetic construct; identical to SEQ ID NO: 495
  REGION 1..495: note = CD123 CAR (C7)

SEQ ID NO: 816 - protein, 495 aa, synthetic construct
  REGION 1..495: note = CD123 CAR (C11)
MALPVTALLLPLALLLHAARPQSVVTQPPSASGTPGQRVTISCSGSSSNIGSNYVYWYQQLPGTAPKLLIYRNNQRPSGVPDRFSGSKSGTSASLAISGLRSEDEADYYCAAWDDSLSGYVFGTGTKLTVLGGGGSGGGGSGGGGSEVQLVESGGGLVQPGRSLRLSCTASGFTFGDYAMSWVRQAPGKGLEWVGFIRSKAYGGTTEYAASVKGRFTISRDDSKSIAYLQMNSLKTEDTAVYYCTRDIGYYGSGSYSPFDYWGQGTLVTVSSTTTPAPRPPTPAPTIASQPLSLRPEACRPAAGGAVHTRGLDFACDIYIWAPLAGTCGVLLLSLVITLYCKRGRKKLLYIFKQPFMRPVQTTQEEDGCSCRFPEEEEGGCELRVKFSRSADAPAYKQGQNQLYNELNLGRREEYDVLDKRRGRDPEMGGKPRRKNPQEGLYNELQKDKMAEAYSEIGMKGERRRGKGHDGLYQGLSTATKDTYDALHMQALPPR

SEQ ID NO: 817 - protein, 5 aa, synthetic construct
  REGION 1..5: note = (GGGGS)n, n=1, 2, 3, 4, or 5
GGGGS

SEQ ID NO: 818 - protein, 5 aa, synthetic construct
  REGION 1..5: note = (EAAAK)n, n=1,2,3, 4,or 5
EAAAK

SEQ ID NO: 819 - skipped

SEQ ID NO: 820 - protein, 5 aa, synthetic construct
  REGION 1..5: note = linker
GGGGS

SEQ ID NO: 821 - protein, 17 aa, synthetic construct
  REGION 1..17: note = linker
GSGGGGSGGGGSGGGGS

SEQ ID NO: 822 - protein, 20 aa, synthetic construct
  REGION 1..20: note = P2A
ATNFSLLKQAGDVEENPGPM

SEQ ID NO: 823 - protein, 18 aa, synthetic construct
  REGION 1..18: note = T2A
EGRGSLLTCGDVEENPGP

SEQ ID NO: 824 - protein, 20 aa, synthetic construct
  REGION 1..20: note = E2A
QCTNYALLKLAGDVESNPGP

SEQ ID NO: 825 - protein, 22 aa, synthetic construct
  REGION 1..22: note = F2A
VKQTLNFDLLKLAGDVESNPGP

SEQ ID NO: 826 - protein, 522 aa, synthetic construct
  REGION 1..522: note = 4D5-6.CD3 (HER2 BiTE)
MDFQVQIFSFLLISASVIMSRGDIQMTQSPSSLSASVGDRVTITCRASQDVNTAVAWYQQKPGKAPKLLIYSASFLYSGVPSRFSGSRSGTDFTLTISSLQPEDFATYYCQQHYTTPPTFGQGTKVEIKRTGSTSGSGKPGSGEGSEVQLVESGGGLVQPGGSLRLSCAASGFNIKDTYIHWVRQAPGKGLEWVARIYPTNGYTRYADSVKGRFTISADTSKNTAYLQMNSLRAEDTAVYYCSRWGGDGFVAMDVWGQGTLVTVSSGGGGSDIKLQQSGAELARPGASVKMSCKTSGYTFTRYTMHWVKQRPGQGLEWIGYINPSRGYTNYNQKFKDKATLTTDKSSSTAYMQLSSLTSEDSAVYFCARYYDDHYCLDYWGQGTTLTVSSVEGGSGGSGGSGGSGGVDDAAIQLTQSPAIMSASPGEKVTMTCRASSSVSYMNWYQQKSGTSPKRWIYDTSKVASGVPYRFSGSGSGTSYSLTISSMEAEDAATYYCQQWSSNPLTFGAGTKLELKHHHHHH

SEQ ID NO: 827 - DNA, 1569 bp, synthetic construct
  misc_feature 1..1569: note = 4D5-6.CD3 (HER2 BiTE)
  source 1..1569: mol_type = other DNA
atggacttccaggttcagatcttttcgttcctgctgatcagcgcctctgttatcatgtcgcgcggcgacatccagatgacccagtccccttcctccctctctgcctctgtgggagaccgcgttaccatcacatgccgagcttcccaggacgtgaacacagccgtggcctggtaccagcagaagcccgggaaggcacccaaactcctcatctactccgcctccttcctatacagtggcgtgccttcccgattctccggctccaggagtggcacggactttacgctcaccattagtagcctgcagcccgaagacttcgcgacctactattgtcagcaacactacacgacgccaccaactttcggccagggtaccaaggtcgagattaagcgaaccggcagtaccagtgggtctggcaagcccggcagcggcgagggatccgaggtccagctggtcgagtccggcgggggcctggtgcagccgggcggctcgctgaggttatcttgcgccgccagtggcttcaacatcaaggatacttacatccactgggtgaggcaggctccgggcaagggcctggaatgggtggctaggatctaccctactaacgggtacacacgctacgcagattcggtgaaaggccgcttcactatctccgccgacacctcgaagaacactgcttacctgcagatgaactccctcagggccgaagatactgcagtctactactgctcccgctggggtggggacggcttcgtcgccatggacgtgtggggtcagggcactctagttacagtgtcatccggaggtggtggatccgatatcaaactgcagcagtcaggggctgaactggcaagacctggggcctcagtgaagatgtcctgcaagacttctggctacacctttactaggtacacgatgcactgggtaaaacagaggcctggacagggtctggaatggattggatacattaatcctagccgtggttatactaattacaatcagaagttcaaggacaaggccacattgactacagacaaatcctccagcacagcctacatgcaactgagcagcctgacatctgaggactctgcggtctatttctgtgcaagatattatgatgatcattactgccttgactactggggccaaggcaccactctcacagtctcctcagtcgaaggtggaagtggaggttctggtggaagtggaggttcgggtggagtcgacgacgccgccattcagctgacccagtctccagcaatcatgtctgcatctccaggggagaaggtcaccatgacctgcagagccagttcaagtgtaagttacatgaactggtaccagcagaagtcaggcacctcccccaaaagatggatttatgacacatccaaagtggcttctggagtcccttatcgcttcagtggcagtgggtctgggacctcatactctctcacaatcagcagcatggaggctgaagatgctgccacttattactgccaacagtggagtagtaacccgctcacgttcggtgctgggaccaagctggagctgaaacatcatcaccatcatcattaa

SEQ ID NO: 828 - protein, 12 aa, synthetic construct
  REGION 1..12: note = 40-18 VL CDR1
RASQSVSNSYLA

SEQ ID NO: 829 - protein, 11 aa, synthetic construct
  REGION 1..11: note = 40-37 VL CDR1
SGDKLGNKYAS

SEQ ID NO: 830 - protein, 11 aa, synthetic construct
  REGION 1..11: note = 40-38 VL CDR1
TGQRLGDKYAS

SEQ ID NO: 831 - protein, 14 aa, synthetic construct
  REGION 1..14: note = 40-45 VL CDR1
TGTSSDVGGYKYVS

SEQ ID NO: 832 - protein, 14 aa, synthetic construct
  REGION 1..14: note = 40-47 VL CDR1
TGTSSDVGAYNYVS

SEQ ID NO: 833 - protein, 14 aa, synthetic construct
  REGION 1..14: note = 40-52 VL CDR1
TGTSSDVGAYNFVS

SEQ ID NO: 834 - protein, 7 aa, synthetic construct
  REGION 1..7: note = 40-18 VL CDR2
GASSRAT

SEQ ID NO: 835 - protein, 7 aa, synthetic construct
  REGION 1..7: note = 40-37 VL CDR2
QDSRRPS

SEQ ID NO: 836 - protein, 7 aa, synthetic construct
  REGION 1..7: note = 40-38 VL CDR2
QDSKRPS

SEQ ID NO: 837 - protein, 7 aa, synthetic construct
  REGION 1..7: note = 40-45 VL CDR2
DVSNRPS

SEQ ID NO: 838 - protein, 7 aa, synthetic construct
  REGION 1..7: note = 40-47 VL CDR2
DVTNRPS

SEQ ID NO: 839 - protein, 7 aa, synthetic construct
  REGION 1..7: note = 40-52 VL CDR2
DVRKRPS

SEQ ID NO: 840 - protein, 9 aa, synthetic construct
  REGION 1..9: note = 40-18 VL CDR3
QQYGSSPWT

SEQ ID NO: 841 - protein, 9 aa, synthetic construct
  REGION 1..9: note = 40-37 VL CDR3
QAWDSSTAL

SEQ ID NO: 842 - protein, 9 aa, synthetic construct
  REGION 1..9: note = 40-38 VL CDR3
QAWDSNSVV

SEQ ID NO: 843 - protein, 12 aa, synthetic construct
  REGION 1..12: note = 40-45 VL CDR3
SSYTSSSTPHVV

SEQ ID NO: 844 - protein, 10 aa, synthetic construct
  REGION 1..10: note = 40-47 VL CDR3
GSYTTSSTLI

SEQ ID NO: 845 - protein, 10 aa, synthetic construct
  REGION 1..10: note = 40-52 VL CDR3
SSYAGNNNLV

SEQ ID NO: 846 - protein, 7 aa, synthetic construct
  REGION 1..7: note = 40-18 VH CDR1
RGNYYWS

SEQ ID NO: 847 - protein, 5 aa, synthetic construct
  REGION 1..5: note = 40-37 VH CDR1
SYAMH

SEQ ID NO: 848 - protein, 5 aa, synthetic construct
  REGION 1..5: note = 40-38 VH CDR1
DYYMH

SEQ ID NO: 849 - protein, 5 aa, synthetic construct
  REGION 1..5: note = 40-45 VH CDR1
RYGMH

SEQ ID NO: 850 - protein, 5 aa, synthetic construct
  REGION 1..5: note = 40-47 VH CDR1
SNWMS

SEQ ID NO: 851 - protein, 5 aa, synthetic construct
  REGION 1..5: note = 40-52 VH CDR1
SYAIS

SEQ ID NO: 852 - protein, 16 aa, synthetic construct
  REGION 1..16: note = 40-18 VH CDR2
FISNSGPTYYTPSLKS

SEQ ID NO: 853 - protein, 17 aa, synthetic construct
  REGION 1..17: note = 40-37 VH CDR2
VISKDGSYENYVDSVKG

SEQ ID NO: 854 - protein, 17 aa, synthetic construct
  REGION 1..17: note = 40-38 VH CDR2
RITPSSGGTNYAQKFQG

SEQ ID NO: 855 - protein, 17 aa, synthetic construct
  REGION 1..17: note = 40-45 VH CDR2
YISSSGSTIYYADSVKG

SEQ ID NO: 856 - protein, 17 aa, synthetic construct
  REGION 1..17: note = 40-47 VH CDR2
NINQDGSEKYYVDSVKG

SEQ ID NO: 857 - protein, 17 aa, synthetic construct
  REGION 1..17: note = 40-52 VH CDR2
MINPSGGTTSYAQKFQG

SEQ ID NO: 858 - protein, 15 aa, synthetic construct
  REGION 1..15: note = 40-18 VH CDR3
AKYYYDSDGYNWFDP

SEQ ID NO: 859 - protein, 8 aa, synthetic construct
  REGION 1..8: note = 40-37 VH CDR3
DYWYGMDV

SEQ ID NO: 860 - protein, 9 aa, synthetic construct
  REGION 1..9: note = 40-38 VH CDR3
DNHGYALDY

SEQ ID NO: 861 - protein, 12 aa, synthetic construct
  REGION 1..12: note = 40-45 VH CDR3
GTRPGITGRLGY

SEQ ID NO: 862 - protein, 7 aa, synthetic construct
  REGION 1..7: note = 40-47 VH CDR3
GGYRYAY

SEQ ID NO: 863 - protein, 6 aa, synthetic construct
  REGION 1..6: note = 40-52 VH CDR3
GFRMDQ

SEQ ID NO: 864 - protein, 108 aa, synthetic construct
  REGION 1..108: note = 40-18 VL
EIVLTQSPGTLSLSPGERATLSCRASQSVSNSYLAWYQQKPGQAPRLLIFGASSRATDIPDRFSGSGSGTDFTLTINRLEPEDFAVFYCQQYGSSPWTFGQGTKLEIK

SEQ ID NO: 865 - protein, 106 aa, synthetic construct
  REGION 1..106: note = 40-37 VL
SYELTQPPSVSVSPGQTASITCSGDKLGNKYASWYQQKPGQSPVLVIFQDSRRPSGIPERFSGSNSGNTATLTISGTQAMDEADYYCQAWDSSTALFGGGTKLTVL

SEQ ID NO: 866 - protein, 106 aa, synthetic construct
  REGION 1..106: note = 40-38 VL
SYELTQPPSVSVSLGQTVSITCTGQRLGDKYASWYQQRTGQAPVVVITQDSKRPSGIPERFSGSNSGNTATLTISGTQTMDEADYYCQAWDSNSVVFGGGTELTVL

SEQ ID NO: 867 - protein, 112 aa, synthetic construct
  REGION 1..112: note = 40-45 VL
QSALTQPASVSGSPGQSITISCTGTSSDVGGYKYVSWYQQHPGKAPKLMIYDVSNRPSGVSNRFSGSKSGNTASLTISGLQAEDEADYYCSSYTSSSTPHVVFGGGTKVTVL

SEQ ID NO: 868 - protein, 110 aa, synthetic construct
  REGION 1..110: note = 40-47 VL
QSALTQPASVSGSPGQSITISCTGTSSDVGAYNYVSWYQQLPGKTPKLMIYDVTNRPSGVSNRFSGSKSGNTASLTISGLQAEDEAYYYCGSYTTSSTLIFGGGTELTVL

SEQ ID NO: 869 - protein, 110 aa, synthetic construct
  REGION 1..110: note = 40-52 VL
QSALTQPPSASGSPGQSVTISCTGTSSDVGAYNFVSWYQQHPGNAPKLIIYDVRKRPSGIPDRFSASKSGNTASLTVSGLQADDEADYYCSSYAGNNNLVFGGGTKLTVL

SEQ ID NO: 870 - protein, 125 aa, synthetic construct
  REGION 1..125: note = 40-18 VH
QLQLQESGPGLVKPSQTLSLTCTVSGGPINRGNYYWSWIRQLPGKGLEWIGFISNSGPTYYTPSLKSRVTISRDTSKNQFFLNLTSVTAADTAVYFCARAKYYYDSDGYNWFDPWGQGALVTVSS

SEQ ID NO: 871 - protein, 117 aa, synthetic construct
  REGION 1..117: note = 40-37 VH
QVQLVQSGGGVVQPGRSLRLSCAASGFTFSSYAMHWVRQAPGKGLEWVAVISKDGSYENYVDSVKGRLAISRDNSKNTLFLQMDSLRPEDTALYFCARDYWYGMDVWGQGTTVTVSS

SEQ ID NO: 872 - protein, 118 aa, synthetic construct
  REGION 1..118: note = 40-38 VH
QVQLVQSGAEVKKPGSSVKVSCKASGYTFTDYYMHWVRQAPGQGLEWMGRITPSSGGTNYAQKFQGRVTMTRDTSISTAYMELSRLRSDDTAVYYCVRDNHGYALDYWGQGTLVTVSS

SEQ ID NO: 873 - protein, 121 aa, synthetic construct
  REGION 1..121: note = 40-45 VH
EVHLVESGGGVVQPGRSLRLSCAASGFPFSRYGMHWVRQAPGKGLEWVSYISSSGSTIYYADSVKGRFTISRDNSKNTVSLQMNSLRADDTAVYYCSRGTRPGITGRLGYWGQGTLVTVSS

SEQ ID NO: 874 - protein, 116 aa, synthetic construct
  REGION 1..116: note = 40-47 VH
EVHLVESGGGLVQPGGSLRLSCAASGFTFSSNWMSWVRQAPGKGLEWVANINQDGSEKYYVDSVKGRFTISRDNAKNSLYLQLNSLRAEDTAEYYCARGGYRYAYWGQGTLVTVSS

SEQ ID NO: 875 - protein, 115 aa, synthetic construct
  REGION 1..115: note = 40-52 VH
QVQLVQSGAEVKKPGSSVKVSCKASGGTFSSYAISWVRQAPGQGLEWMGMINPSGGTTSYAQKFQGRVTMTRDTSTSTVYMELSSLRPEDTAVYYCARGFRMDQWGQGTLVTVSS

SEQ ID NO: 876 - DNA, 324 bp, synthetic construct
  misc_feature 1..324: note = 40-18 VL NT
  source 1..324: mol_type = other DNA
gaaatagtgttgacgcagtctccaggcaccctgtctttgtctccaggggaaagagccaccctctcctgcagggccagtcagagtgttagcaacagctacttagcctggtaccagcagaaacctggccaggctcccaggctcctcatctttggtgcatccagcagggccactgacatcccagacaggttcagtggcagtgggtctgggacagacttcactctcaccatcaacaggctggagcctgaagattttgcagtattttactgtcagcagtatggtagctcaccgtggacgttcggccaagggaccaagctggagatcaaa

SEQ ID NO: 877 - DNA, 318 bp, synthetic construct
  misc_feature 1..318: note = 40-37 VL NT
  source 1..318: mol_type = other DNA
tcctatgagctgactcagccaccctcagtgtccgtgtccccaggacagacagccagcatcacctgctctggagataaattgggaaataaatatgcttcttggtatcagcagaagccaggccagtcccctgttctggtcatctttcaagacagcaggcggccctcagggatccctgagcgattctcgggctccaactctgggaacacagccactctgaccatcagcgggacccaggctatggatgaggctgactattactgtcaggcgtgggacagcagcactgccttattcggcggagggaccaagctgaccgtccta

SEQ ID NO: 878 - DNA, 318 bp, synthetic construct
  misc_feature 1..318: note = 40-38 VL NT
  source 1..318: mol_type = other DNA
tcctatgagctgacgcagccaccctcagtgtccgtgtccctgggacagacagtctccatcacctgcactggacaaagattgggggataagtatgcttcatggtatcagcagaggacaggccaggcccctgtagttgtcatcactcaagatagtaagcggccctcagggatccctgagcgattctctggctccaactctgggaacacagccactctgaccatcagcgggacccagactatggatgaggctgactattactgtcaggcgtgggacagtaatagtgtggtgttcggcggagggaccgagctgaccgtccta

SEQ ID NO: 879 - DNA, 336 bp, synthetic construct
  misc_feature 1..336: note = 40-45 VL NT
  source 1..336: mol_type = other DNA
caatctgccctgactcagcctgcctccgtgtctgggtctcctggacagtcgatcaccatctcctgcactggaaccagcagtgacgttggtggttataaatatgtctcctggtaccaacaacacccaggcaaagcccccaaactcatgatttatgatgtcagtaatcggccctcaggggtttctaatcgcttctctggctccaagtctggcaacacggcctccctgaccatctctgggctccaggctgaggacgaggctgattattactgcagctcatatacaagcagcagcactccccatgtggtattcggcggagggaccaaggtcaccgtccta

SEQ ID NO: 880 - DNA, 330 bp, synthetic construct
  misc_feature 1..330: note = 40-47 VL NT
  source 1..330: mol_type = other DNA
caatctgccctgactcagcctgcctccgtgtctgggtctcctggacagtcgatcaccatctcctgcactgggaccagcagtgacgttggtgcctataactatgtctcctggtaccaacaattaccaggcaaaacccccaaactcatgatttatgatgtcactaatcggccctcaggggtttctaatcgcttctctggctccaagtctggcaacacggcctccctgaccatctctgggctccaggctgaggacgaggcttattattattgtggctcatatacaaccagcagcactctgatattcggcggagggaccgagctgaccgtccta

SEQ ID NO: 881 - DNA, 330 bp, synthetic construct
  misc_feature 1..330: note = 40-52 VL NT
  source 1..330: mol_type = other DNA
cagtctgccctgactcagcctccctccgcgtccgggtctcctggacagtcagtcaccatctcctgcactggaaccagcagtgacgttggtgcttataactttgtctcctggtaccaacagcacccaggcaatgcccccaaactcataatttatgacgtccgtaagcggccctcagggatccctgatcgcttctctgcctccaagtctggcaacacggcctccctgaccgtctctgggctccaggctgacgatgaggctgattattactgcagctcatatgcaggcaacaacaatttggtattcggcggagggaccaagctgaccgtccta

SEQ ID NO: 882 - DNA, 375 bp, synthetic construct
  misc_feature 1..375: note = 40-18 VH NT
  source 1..375: mol_type = other DNA
cagctgcagctgcaggagtcgggcccaggactggtgaagccttcacagaccctgtctctcacctgcactgtctctggtggccccatcaacagggggaattactactggagttggatccgccagctcccagggaagggcctggagtggattgggttcatctctaacagtggacccacctactacaccccgtccctcaagagtcgcgttaccatatccagagacacgtctaagaaccagttcttcctgaacttgacctctgtgacggccgcggacacggccgtgtatttctgtgcgcgagctaagtattactacgacagtgatggttacaactggttcgacccctggggccagggagccctggtcactgtctcctca

SEQ ID NO: 883 - DNA, 351 bp, synthetic construct
  misc_feature 1..351: note = 40-37 VH NT
  source 1..351: mol_type = other DNA
caggtgcagctggtacagtctgggggaggcgtggtccagcctgggaggtccctgagactctcctgtgcagcctctggattcaccttcagcagctatgctatgcactgggtccgccaggctccaggcaaggggctggagtgggtggcagttatatcaaaagatggaagttatgaaaactatgtagactccgtgaagggccgactcgccatctccagagacaattccaagaacacgctgtttctgcaaatggacagcctgagacctgaggacacggctctatatttctgtgcgagggactactggtacggtatggacgtctggggccaagggaccacggtcaccgtctcctca

SEQ ID NO: 884 - DNA, 354 bp, synthetic construct
  misc_feature 1..354: note = 40-38 VH NT
  source 1..354: mol_type = other DNA
caggtgcagctggtacagtctggggctgaggtgaagaagcctgggtcctcggtgaaggtctcctgcaaggcttctggatacaccttcaccgactactatatgcactgggtgcgacaggcccctggacaagggcttgagtggatgggacggatcacccctagcagtggtggcacaaactatgcacagaagtttcagggcagggtcaccatgaccagggacacgtccatcagcacagcctacatggagctgagcaggctgagatctgacgacacggccgtgtattattgtgtgagagataaccatggctacgccctggactactggggccagggaaccctggtcactgtctcctca

SEQ ID NO: 885 - DNA, 363 bp, synthetic construct
  misc_feature 1..363: note = 40-45 VH NT
  source 1..363: mol_type = other DNA
gaggtgcatctggtggagtctgggggaggcgtggtccagcctgggaggtccctgagactctcctgtgcagcgtctggattccccttcagtcgctatggcatgcactgggtccgccaggctccaggcaaggggctggagtgggtttcatacattagtagtagtggtagtaccatatactacgcagactccgtgaagggccgattcaccatctccagagacaattcgaagaacacggtgtctctgcaaatgaatagcctgagagccgacgacacggctgtctattactgttcgagagggacccgtcctggaataactggaagacttggctactggggccagggaaccctggtcactgtctcctca

SEQ ID NO: 886 - DNA, 348 bp, synthetic construct
  misc_feature 1..348: note = 40-47 VH NT
  source 1..348: mol_type = other DNA
gaggtgcatctggtggagtctgggggaggcttggtccagcctggggggtccctgagactctcctgtgcagcctctggattcacctttagtagcaattggatgagttgggtccgccaggctccagggaaggggctggagtgggtggccaacataaaccaagatggaagtgagaaatactatgtggactctgtgaagggccgattcaccatctccagagacaacgccaagaactcactgtatctgcaactgaacagcctgagagccgaggacacggctgagtattactgtgcgagagggggatacagatatgcctattggggccagggaaccctggtcaccgtctcctca

SEQ ID NO: 887 - DNA, 345 bp, synthetic construct
  misc_feature 1..345: note = 40-52 VH NT
  source 1..345: mol_type = other DNA
caggtgcagctggtacagtctggggctgaggtgaagaagcctgggtcctcggtgaaggtctcctgcaaggcttctggaggcaccttcagcagctatgctatcagctgggtgcgacaggcccctggacaagggcttgagtggatgggaatgatcaaccctagtggtggtaccacaagctacgcacagaagttccagggcagagtcaccatgaccagggacacgtccacgagtacagtctacatggagctgagcagcctgagacctgaggacacggccgtgtattactgtgcgagagggtttagaatggaccagtggggccagggaaccctggtcactgtctcctca

SEQ ID NO: 888 - protein, 248 aa, synthetic construct
  REGION 1..248: note = 40-18 scFv
EIVLTQSPGTLSLSPGERATLSCRASQSVSNSYLAWYQQKPGQAPRLLIFGASSRATDIPDRFSGSGSGTDFTLTINRLEPEDFAVFYCQQYGSSPWTFGQGTKLEIKGGGGSGGGGSGGGGSQLQLQESGPGLVKPSQTLSLTCTVSGGPINRGNYYWSWIRQLPGKGLEWIGFISNSGPTYYTPSLKSRVTISRDTSKNQFFLNLTSVTAADTAVYFCARAKYYYDSDGYNWFDPWGQGALVTVSS

SEQ ID NO: 889 - protein, 238 aa, synthetic construct
  REGION 1..238: note = 40-37 scFv
SYELTQPPSVSVSPGQTASITCSGDKLGNKYASWYQQKPGQSPVLVIFQDSRRPSGIPERFSGSNSGNTATLTISGTQAMDEADYYCQAWDSSTALFGGGTKLTVLGGGGSGGGGSGGGGSQVQLVQSGGGVVQPGRSLRLSCAASGFTFSSYAMHWVRQAPGKGLEWVAVISKDGSYENYVDSVKGRLAISRDNSKNTLFLQMDSLRPEDTALYFCARDYWYGMDVWGQGTTVTVSS

SEQ ID NO: 890 - protein, 239 aa, synthetic construct
  REGION 1..239: note = 40-38 scFv
SYELTQPPSVSVSLGQTVSITCTGQRLGDKYASWYQQRTGQAPVVVITQDSKRPSGIPERFSGSNSGNTATLTISGTQTMDEADYYCQAWDSNSVVFGGGTELTVLGGGGSGGGGSGGGGSQVQLVQSGAEVKKPGSSVKVSCKASGYTFTDYYMHWVRQAPGQGLEWMGRITPSSGGTNYAQKFQGRVTMTRDTSISTAYMELSRLRSDDTAVYYCVRDNHGYALDYWGQGTLVTVSS

SEQ ID NO: 891 - protein, 248 aa, synthetic construct
  REGION 1..248: note = 40-45 scFv
QSALTQPASVSGSPGQSITISCTGTSSDVGGYKYVSWYQQHPGKAPKLMIYDVSNRPSGVSNRFSGSKSGNTASLTISGLQAEDEADYYCSSYTSSSTPHVVFGGGTKVTVLGGGGSGGGGSGGGGSEVHLVESGGGVVQPGRSLRLSCAASGFPFSRYGMHWVRQAPGKGLEWVSYISSSGSTIYYADSVKGRFTISRDNSKNTVSLQMNSLRADDTAVYYCSRGTRPGITGRLGYWGQGTLVTVSS

SEQ ID NO: 892 - protein, 241 aa, synthetic construct
  REGION 1..241: note = 40-47 scFv
QSALTQPASVSGSPGQSITISCTGTSSDVGAYNYVSWYQQLPGKTPKLMIYDVTNRPSGVSNRFSGSKSGNTASLTISGLQAEDEAYYYCGSYTTSSTLIFGGGTELTVLGGGGSGGGGSGGGGSEVHLVESGGGLVQPGGSLRLSCAASGFTFSSNWMSWVRQAPGKGLEWVANINQDGSEKYYVDSVKGRFTISRDNAKNSLYLQLNSLRAEDTAEYYCARGGYRYAYWGQGTLVTVSS

SEQ ID NO: 893 - protein, 240 aa, synthetic construct
  REGION 1..240: note = 40-52 scFv
QSALTQPPSASGSPGQSVTISCTGTSSDVGAYNFVSWYQQHPGNAPKLIIYDVRKRPSGIPDRFSASKSGNTASLTVSGLQADDEADYYCSSYAGNNNLVFGGGTKLTVLGGGGSGGGGSGGGGSQVQLVQSGAEVKKPGSSVKVSCKASGGTFSSYAISWVRQAPGQGLEWMGMINPSGGTTSYAQKFQGRVTMTRDTSTSTVYMELSSLRPEDTAVYYCARGFRMDQWGQGTLVTVSS

SEQ ID NO: 894 - protein, 384 aa, synthetic construct
  REGION 1..384: note = 40-18.28
MALPVTALLLPLALLLHAARPEIVLTQSPGTLSLSPGERATLSCRASQSVSNSYLAWYQQKPGQAPRLLIFGASSRATDIPDRFSGSGSGTDFTLTINRLEPEDFAVFYCQQYGSSPWTFGQGTKLEIKGGGGSGGGGSGGGGSQLQLQESGPGLVKPSQTLSLTCTVSGGPINRGNYYWSWIRQLPGKGLEWIGFISNSGPTYYTPSLKSRVTISRDTSKNQFFLNLTSVTAADTAVYFCARAKYYYDSDGYNWFDPWGQGALVTVSSASTTTPAPRPPTPAPTIASQPLSLRPEACRPAAGGAVHTRGLDFACDFWVLVVVGGVLACYSLLVTVAFIIFWVRSKRSRLLHSDYMNMTPRRPGPTRKHYQPYAPPRDFAAYRS

SEQ ID NO: 895 - protein, 374 aa, synthetic construct
  REGION 1..374: note = 40-37.28
MALPVTALLLPLALLLHAARPSYELTQPPSVSVSPGQTASITCSGDKLGNKYASWYQQKPGQSPVLVIFQDSRRPSGIPERFSGSNSGNTATLTISGTQAMDEADYYCQAWDSSTALFGGGTKLTVLGGGGSGGGGSGGGGSQVQLVQSGGGVVQPGRSLRLSCAASGFTFSSYAMHWVRQAPGKGLEWVAVISKDGSYENYVDSVKGRLAISRDNSKNTLFLQMDSLRPEDTALYFCARDYWYGMDVWGQGTTVTVSSASTTTPAPRPPTPAPTIASQPLSLRPEACRPAAGGAVHTRGLDFACDFWVLVVVGGVLACYSLLVTVAFIIFWVRSKRSRLLHSDYMNMTPRRPGPTRKHYQPYAPPRDFAAYRS

SEQ ID NO: 896 - protein, 375 aa, synthetic construct
  REGION 1..375: note = 40-38.28
MALPVTALLLPLALLLHAARPSYELTQPPSVSVSLGQTVSITCTGQRLGDKYASWYQQRTGQAPVVVITQDSKRPSGIPERFSGSNSGNTATLTISGTQTMDEADYYCQAWDSNSVVFGGGTELTVLGGGGSGGGGSGGGGSQVQLVQSGAEVKKPGSSVKVSCKASGYTFTDYYMHWVRQAPGQGLEWMGRITPSSGGTNYAQKFQGRVTMTRDTSISTAYMELSRLRSDDTAVYYCVRDNHGYALDYWGQGTLVTVSSASTTTPAPRPPTPAPTIASQPLSLRPEACRPAAGGAVHTRGLDFACDFWVLVVVGGVLACYSLLVTVAFIIFWVRSKRSRLLHSDYMNMTPRRPGPTRKHYQPYAPPRDFAAYRS

SEQ ID NO: 897 - protein, 384 aa, synthetic construct
  REGION 1..384: note = 40-45.28
MALPVTALLLPLALLLHAARPQSALTQPASVSGSPGQSITISCTGTSSDVGGYKYVSWYQQHPGKAPKLMIYDVSNRPSGVSNRFSGSKSGNTASLTISGLQAEDEADYYCSSYTSSSTPHVVFGGGTKVTVLGGGGSGGGGSGGGGSEVHLVESGGGVVQPGRSLRLSCAASGFPFSRYGMHWVRQAPGKGLEWVSYISSSGSTIYYADSVKGRFTISRDNSKNTVSLQMNSLRADDTAVYYCSRGTRPGITGRLGYWGQGTLVTVSSASTTTPAPRPPTPAPTIASQPLSLRPEACRPAAGGAVHTRGLDFACDFWVLVVVGGVLACYSLLVTVAFIIFWVRSKRSRLLHSDYMNMTPRRPGPTRKHYQPYAPPRDFAAYRS

SEQ ID NO: 898 - protein, 377 aa, synthetic construct
  REGION 1..377: note = 40-47.28
MALPVTALLLPLALLLHAARPQSALTQPASVSGSPGQSITISCTGTSSDVGAYNYVSWYQQLPGKTPKLMIYDVTNRPSGVSNRFSGSKSGNTASLTISGLQAEDEAYYYCGSYTTSSTLIFGGGTELTVLGGGGSGGGGSGGGGSEVHLVESGGGLVQPGGSLRLSCAASGFTFSSNWMSWVRQAPGKGLEWVANINQDGSEKYYVDSVKGRFTISRDNAKNSLYLQLNSLRAEDTAEYYCARGGYRYAYWGQGTLVTVSSASTTTPAPRPPTPAPTIASQPLSLRPEACRPAAGGAVHTRGLDFACDFWVLVVVGGVLACYSLLVTVAFIIFWVRSKRSRLLHSDYMNMTPRRPGPTRKHYQPYAPPRDFAAYRS

SEQ ID NO: 899 - protein, 376 aa, synthetic construct
  REGION 1..376: note = 40-52.28
MALPVTALLLPLALLLHAARPQSALTQPPSASGSPGQSVTISCTGTSSDVGAYNFVSWYQQHPGNAPKLIIYDVRKRPSGIPDRFSASKSGNTASLTVSGLQADDEADYYCSSYAGNNNLVFGGGTKLTVLGGGGSGGGGSGGGGSQVQLVQSGAEVKKPGSSVKVSCKASGGTFSSYAISWVRQAPGQGLEWMGMINPSGGTTSYAQKFQGRVTMTRDTSTSTVYMELSSLRPEDTAVYYCARGFRMDQWGQGTLVTVSSASTTTPAPRPPTPAPTIASQPLSLRPEACRPAAGGAVHTRGLDFACDFWVLVVVGGVLACYSLLVTVAFIIFWVRSKRSRLLHSDYMNMTPRRPGPTRKHYQPYAPPRDFAAYRS

SEQ ID NO: 900 - DNA, 1155 bp, synthetic construct
  misc_feature 1..1155: note = 40-18.28 NT
  source 1..1155: mol_type = other DNA
atggccttaccagtgaccgccttgctcctgccgctggccttgctgctccacgccgccaggccggaaatagtgttgacgcagtctccaggcaccctgtctttgtctccaggggaaagagccaccctctcctgcagggccagtcagagtgttagcaacagctacttagcctggtaccagcagaaacctggccaggctcccaggctcctcatctttggtgcatccagcagggccactgacatcccagacaggttcagtggcagtgggtctgggacagacttcactctcaccatcaacaggctggagcctgaagattttgcagtattttactgtcagcagtatggtagctcaccgtggacgttcggccaagggaccaagctggagatcaaaggtggtggtggttctggcggcggcggctccggaggtggtggatcccagctgcagctgcaggagtcgggcccaggactggtgaagccttcacagaccctgtctctcacctgcactgtctctggtggccccatcaacagggggaattactactggagttggatccgccagctcccagggaagggcctggagtggattgggttcatctctaacagtggacccacctactacaccccgtccctcaagagtcgcgttaccatatccagagacacgtctaagaaccagttcttcctgaacttgacctctgtgacggccgcggacacggccgtgtatttctgtgcgcgagctaagtattactacgacagtgatggttacaactggttcgacccctggggccagggagccctggtcactgtctcctcagctagcaccacgacgccagcgccgcgaccaccaacaccggcgcccaccatcgcgtcgcagcccctgtccctgcgcccagaggcgtgccggccagcggcggggggcgcagtgcacacgagggggctggacttcgcctgtgatttttgggtgctggtggtggttggtggagtcctggcttgctatagcttgctagtaacagtggcctttattattttctgggtgaggagtaagaggagcaggctcctgcacagtgactacatgaacatgactccccgccgccccgggcccacccgcaagcattaccagccctatgccccaccacgcgacttcgcagcctatcgctcctaa

SEQ ID NO: 901 - DNA, 1125 bp, synthetic construct
  misc_feature 1..1125: note = 40-37.28 NT
  source 1..1125: mol_type = other DNA
atggccttaccagtgaccgccttgctcctgccgctggccttgctgctccacgccgccaggccgtcctatgagctgactcagccaccctcagtgtccgtgtccccaggacagacagccagcatcacctgctctggagataaattgggaaataaatatgcttcttggtatcagcagaagccaggccagtcccctgttctggtcatctttcaagacagcaggcggccctcagggatccctgagcgattctcgggctccaactctgggaacacagccactctgaccatcagcgggacccaggctatggatgaggctgactattactgtcaggcgtgggacagcagcactgccttattcggcggagggaccaagctgaccgtcctaggtggtggtggttctggcggcggcggctccggaggtggtggatcccaggtgcagctggtacagtctgggggaggcgtggtccagcctgggaggtccctgagactctcctgtgcagcctctggattcaccttcagcagctatgctatgcactgggtccgccaggctccaggcaaggggctggagtgggtggcagttatatcaaaagatggaagttatgaaaactatgtagactccgtgaagggccgactcgccatctccagagacaattccaagaacacgctgtttctgcaaatggacagcctgagacctgaggacacggctctatatttctgtgcgagggactactggtacggtatggacgtctggggccaagggaccacggtcaccgtctcctcagctagcaccacgacgccagcgccgcgaccaccaacaccggcgcccaccatcgcgtcgcagcccctgtccctgcgcccagaggcgtgccggccagcggcggggggcgcagtgcacacgagggggctggacttcgcctgtgatttttgggtgctggtggtggttggtggagtcctggcttgctatagcttgctagtaacagtggcctttattattttctgggtgaggagtaagaggagcaggctcctgcacagtgactacatgaacatgactccccgccgccccgggcccacccgcaagcattaccagccctatgccccaccacgcgacttcgcagcctatcgctcctaa

SEQ ID NO: 902 - DNA, 1128 bp, synthetic construct
  misc_feature 1..1128: note = 40-38.28 NT
  source 1..1128: mol_type = other DNA
atggccttaccagtgaccgccttgctcctgccgctggccttgctgctccacgccgccaggccgtcctatgagctgacgcagccaccctcagtgtccgtgtccctgggacagacagtctccatcacctgcactggacaaagattgggggataagtatgcttcatggtatcagcagaggacaggccaggcccctgtagttgtcatcactcaagatagtaagcggccctcagggatccctgagcgattctctggctccaactctgggaacacagccactctgaccatcagcgggacccagactatggatgaggctgactattactgtcaggcgtgggacagtaatagtgtggtgttcggcggagggaccgagctgaccgtcctaggtggtggtggttctggcggcggcggctccggaggtggtggatcccaggtgcagctggtacagtctggggctgaggtgaagaagcctgggtcctcggtgaaggtctcctgcaaggcttctggatacaccttcaccgactactatatgcactgggtgcgacaggcccctggacaagggcttgagtggatgggacggatcacccctagcagtggtggcacaaactatgcacagaagtttcagggcagggtcaccatgaccagggacacgtccatcagcacagcctacatggagctgagcaggctgagatctgacgacacggccgtgtattattgtgtgagagataaccatggctacgccctggactactggggccagggaaccctggtcactgtctcctcagctagcaccacgacgccagcgccgcgaccaccaacaccggcgcccaccatcgcgtcgcagcccctgtccctgcgcccagaggcgtgccggccagcggcggggggcgcagtgcacacgagggggctggacttcgcctgtgatttttgggtgctggtggtggttggtggagtcctggcttgctatagcttgctagtaacagtggcctttattattttctgggtgaggagtaagaggagcaggctcctgcacagtgactacatgaacatgactccccgccgccccgggcccacccgcaagcattaccagccctatgccccaccacgcgacttcgcagcctatcgctcctaa

SEQ ID NO: 903 - DNA, 1155 bp, synthetic construct
  misc_feature 1..1155: note = 40-45.28 NT
  source 1..1155: mol_type = other DNA
atggccttaccagtgaccgccttgctcctgccgctggccttgctgctccacgccgccaggccgcaatctgccctgactcagcctgcctccgtgtctgggtctcctggacagtcgatcaccatctcctgcactggaaccagcagtgacgttggtggttataaatatgtctcctggtaccaacaacacccaggcaaagcccccaaactcatgatttatgatgtcagtaatcggccctcaggggtttctaatcgcttctctggctccaagtctggcaacacggcctccctgaccatctctgggctccaggctgaggacgaggctgattattactgcagctcatatacaagcagcagcactccccatgtggtattcggcggagggaccaaggtcaccgtcctaggtggtggtggttctggcggcggcggctccggaggtggtggatccgaggtgcatctggtggagtctgggggaggcgtggtccagcctgggaggtccctgagactctcctgtgcagcgtctggattccccttcagtcgctatggcatgcactgggtccgccaggctccaggcaaggggctggagtgggtttcatacattagtagtagtggtagtaccatatactacgcagactccgtgaagggccgattcaccatctccagagacaattcgaagaacacggtgtctctgcaaatgaatagcctgagagccgacgacacggctgtctattactgttcgagagggacccgtcctggaataactggaagacttggctactggggccagggaaccctggtcactgtctcctcagctagcaccacgacgccagcgccgcgaccaccaacaccggcgcccaccatcgcgtcgcagcccctgtccctgcgcccagaggcgtgccggccagcggcggggggcgcagtgcacacgagggggctggacttcgcctgtgatttttgggtgctggtggtggttggtggagtcctggcttgctatagcttgctagtaacagtggcctttattattttctgggtgaggagtaagaggagcaggctcctgcacagtgactacatgaacatgactccccgccgccccgggcccacccgcaagcattaccagccctatgccccaccacgcgacttcgcagcctatcgctcctaa

SEQ ID NO: 904 - DNA, 1134 bp, synthetic construct
  misc_feature 1..1134: note = 40-47.28 NT
  source 1..1134: mol_type = other DNA
atggccttaccagtgaccgccttgctcctgccgctggccttgctgctccacgccgccaggccgcaatctgccctgactcagcctgcctccgtgtctgggtctcctggacagtcgatcaccatctcctgcactgggaccagcagtgacgttggtgcctataactatgtctcctggtaccaacaattaccaggcaaaacccccaaactcatgatttatgatgtcactaatcggccctcaggggtttctaatcgcttctctggctccaagtctggcaacacggcctccctgaccatctctgggctccaggctgaggacgaggcttattattattgtggctcatatacaaccagcagcactctgatattcggcggagggaccgagctgaccgtcctaggtggtggtggttctggcggcggcggctccggaggtggtggatccgaggtgcatctggtggagtctgggggaggcttggtccagcctggggggtccctgagactctcctgtgcagcctctggattcacctttagtagcaattggatgagttgggtccgccaggctccagggaaggggctggagtgggtggccaacataaaccaagatggaagtgagaaatactatgtggactctgtgaagggccgattcaccatctccagagacaacgccaagaactcactgtatctgcaactgaacagcctgagagccgaggacacggctgagtattactgtgcgagagggggatacagatatgcctattggggccagggaaccctggtcaccgtctcctcagctagcaccacgacgccagcgccgcgaccaccaacaccggcgcccaccatcgcgtcgcagcccctgtccctgcgcccagaggcgtgccggccagcggcggggggcgcagtgcacacgagggggctggacttcgcctgtgatttttgggtgctggtggtggttggtggagtcctggcttgctatagcttgctagtaacagtggcctttattattttctgggtgaggagtaagaggagcaggctcctgcacagtgactacatgaacatgactccccgccgccccgggcccacccgcaagcattaccagccctatgccccaccacgcgacttcgcagcctatcgctcctaa

SEQ ID NO: 905 - DNA, 1131 bp, synthetic construct
  misc_feature 1..1131: note = 40-52.28 NT
  source 1..1131: mol_type = other DNA
atggccttaccagtgaccgccttgctcctgccgctggccttgctgctccacgccgccaggccgcagtctgccctgactcagcctccctccgcgtccgggtctcctggacagtcagtcaccatctcctgcactggaaccagcagtgacgttggtgcttataactttgtctcctggtaccaacagcacccaggcaatgcccccaaactcataatttatgacgtccgtaagcggccctcagggatccctgatcgcttctctgcctccaagtctggcaacacggcctccctgaccgtctctgggctccaggctgacgatgaggctgattattactgcagctcatatgcaggcaacaacaatttggtattcggcggagggaccaagctgaccgtcctaggtggtggtggttctggcggcggcggctccggaggtggtggatcccaggtgcagctggtacagtctggggctgaggtgaagaagcctgggtcctcggtgaaggtctcctgcaaggcttctggaggcaccttcagcagctatgctatcagctgggtgcgacaggcccctggacaagggcttgagtggatgggaatgatcaaccctagtggtggtaccacaagctacgcacagaagttccagggcagagtcaccatgaccagggacacgtccacgagtacagtctacatggagctgagcagcctgagacctgaggacacggccgtgtattactgtgcgagagggtttagaatggaccagtggggccagggaaccctggtcactgtctcctcagctagcaccacgacgccagcgccgcgaccaccaacaccggcgcccaccatcgcgtcgcagcccctgtccctgcgcccagaggcgtgccggccagcggcggggggcgcagtgcacacgagggggctggacttcgcctgtgatttttgggtgctggtggtggttggtggagtcctggcttgctatagcttgctagtaacagtggcctttattattttctgggtgaggagtaagaggagcaggctcctgcacagtgactacatgaacatgactccccgccgccccgggcccacccgcaagcattaccagccctatgccccaccacgcgacttcgcagcctatcgctcctaa

SEQ ID NO: 906 - protein, 489 aa, synthetic construct; identical to SEQ ID NO: 709
  REGION 1..489: note = 4D5.BBZ (Her2 CAR)

SEQ ID NO: 907 - protein, 486 aa, synthetic construct; identical to SEQ ID NO: 710
  REGION 1..486: note = FMC63.BBZ (CD19 CAR)

SEQ ID NO: 908 - protein, 488 aa, synthetic construct; identical to SEQ ID NO: 711
  REGION 1..488: note = ss1.BBZ (mesothelin CAR)

SEQ ID NO: 909 - protein, 461 aa, synthetic construct; identical to SEQ ID NO: 712
  REGION 1..461: note = J591.BBZ (PSMA CAR)

SEQ ID NO: 910 - protein, 532 aa, synthetic construct; identical to SEQ ID NO: 713
  REGION 1..532: note = c-Met CAR

SEQ ID NO: 911 - protein, 483 aa, synthetic construct; identical to SEQ ID NO: 714
  REGION 1..483: note = BCMA CAR

SEQ ID NO: 912 - protein, 364 aa, synthetic construct; identical to SEQ ID NO: 715
  REGION 1..364: note = FHVH33.BBZ (BCMA CAR)

SEQ ID NO: 913 - protein, 488 aa, synthetic construct; identical to SEQ ID NO: 716
  REGION 1..488: note = BCMA338.BBZ (BCMA CAR)

SEQ ID NO: 914 - protein, 486 aa, synthetic construct; identical to SEQ ID NO: 717
  REGION 1..486: note = G33.BBZ (GPC3 CAR)

SEQ ID NO: 915 - protein, 889 aa, synthetic construct; identical to SEQ ID NO: 718
  REGION 1..889: note = IL13(EQ).BBZ (IL13ra2 car)

SEQ ID NO: 916 - protein, 479 aa, synthetic construct; identical to SEQ ID NO: 719
  REGION 1..479: note = C10.BBZ (EGFR CAR)

SEQ ID NO: 917 - protein, 333 aa, synthetic construct; identical to SEQ ID NO: 720
  REGION 1..333: note = 7G3L.BBZ (CD123 CAR)

SEQ ID NO: 918 - protein, 508 aa, synthetic construct; identical to SEQ ID NO: 721
  REGION 1..508: note = 3A1e.BBZ (CD7 CAR)

SEQ ID NO: 919 - protein, 507 aa, synthetic construct; identical to SEQ ID NO: 722
  REGION 1..507: note = 14.g2a.BBZ

SEQ ID NO: 920 - protein, 483 aa, synthetic construct; identical to SEQ ID NO: 723
  REGION 1..483: note = 2B3.BBZ (PSCA CAR)

SEQ ID NO: 921 - protein, 270 aa, synthetic construct; identical to SEQ ID NO: 724
  REGION 1..270: note = NY-ESO-1 TCR alpha chain

SEQ ID NO: 922 - protein, 308 aa, synthetic construct; identical to SEQ ID NO: 725
  REGION 1..308: note = NY-ESO-1 TCR beta chain

SEQ ID NO: 923 - protein, 603 aa, synthetic construct; identical to SEQ ID NO: 726
  REGION 1..603: note = EBV16-E7 TCR

SEQ ID NO: 924 - protein, 267 aa, synthetic construct; identical to SEQ ID NO: 727
  REGION 1..267: note = EBV16-E7 TCR alpha

SEQ ID NO: 925 - protein, 314 aa, synthetic construct; identical to SEQ ID NO: 728
  REGION 1..314: note = EBV16-E7 TCR beta

SEQ ID NO: 926 - protein, 606 aa, synthetic construct; identical to SEQ ID NO: 729
  REGION 1..606: note = H3.3K27M TCR

SEQ ID NO: 927 - protein, 273 aa, synthetic construct; identical to SEQ ID NO: 730
  REGION 1..273: note = H3.3K27M TCR alpha

SEQ ID NO: 928 - protein, 311 aa, synthetic construct; identical to SEQ ID NO: 731
  REGION 1..311: note = H3.3K27M TCR beta

SEQ ID NO: 929 - protein, 533 aa, synthetic construct; identical to SEQ ID NO: 732
  REGION 1..533: note = CD19-CD3 BiTE

SEQ ID NO: 930 - protein, 521 aa, synthetic construct; identical to SEQ ID NO: 733
  REGION 1..521: note = 139-CD3 (EGFRvIII BiTE)

SEQ ID NO: 931 - protein, 8 aa, synthetic construct
  REGION 1..8: note = linker
GGGGSNNR

SEQ ID NO: 932 - protein, 8 aa, synthetic construct
  REGION 1..8: note = linker
EAAAKNNR

SEQ ID NO: 933 - protein, 6 aa, synthetic construct
  REGION 1..6: note = linker
PANPNR

SEQ ID NO: 934 - protein, 15 aa, synthetic construct
  REGION 1..15: note = linker
GGGGSGGGGSGGGGS

SEQ ID NO: 935 - protein, 277 aa, synthetic construct; identical to SEQ ID NO: 768
  REGION 1..277: note = Human CD40

SEQ ID NO: 936 - protein, 220 aa, synthetic construct; identical to SEQ ID NO: 615
  REGION 1..220: note = Human CD28

SEQ ID NO: 937 - protein, 255 aa, synthetic construct; identical to SEQ ID NO: 618
  REGION 1..255: note = Human 4-1BB

SEQ ID NO: 938 - protein, 199 aa, synthetic construct; identical to SEQ ID NO: 621
  REGION 1..199: note = Human ICOS

SEQ ID NO: 939 - protein, 260 aa, synthetic construct; identical to SEQ ID NO: 624
  REGION 1..260: note = Human CD27

SEQ ID NO: 940 - protein, 277 aa, synthetic construct; identical to SEQ ID NO: 627
  REGION 1..277: note = Human OX40

SEQ ID NO: 941 - protein, 93 aa, synthetic construct; identical to SEQ ID NO: 630
  REGION 1..93: note = Human DAP10

SEQ ID NO: 942 - protein, 595 aa, synthetic construct; identical to SEQ ID NO: 633
  REGION 1..595: note = Human CD30

SEQ ID NO: 943 - protein, 370 aa, synthetic construct; identical to SEQ ID NO: 636
  REGION 1..370: note = Human 2B4

SEQ ID NO: 944 - protein, 351 aa, synthetic construct; identical to SEQ ID NO: 639
  REGION 1..351: note = Human CD2

SEQ ID NO: 945 - protein, 240 aa, synthetic construct; identical to SEQ ID NO: 642
  REGION 1..240: note = Human LIGHT

SEQ ID NO: 946 - protein, 241 aa, synthetic construct; identical to SEQ ID NO: 645
  REGION 1..241: note = Human GITR

SEQ ID NO: 947 - protein, 417 aa, synthetic construct; identical to SEQ ID NO: 648
  REGION 1..417: note = Human DR3

SEQ ID NO: 948 - protein, 400 aa, synthetic construct; identical to SEQ ID NO: 652
  REGION 1..400: note = Human CD43

SEQ ID NO: 949 - protein, 250 aa, synthetic construct; identical to SEQ ID NO: 780
  REGION 1..250: note = Human CD58

SEQ ID NO: 950 - protein, 193 aa, synthetic construct; identical to SEQ ID NO: 781
  REGION 1..193: note = Human CD70

SEQ ID NO: 951 - protein, 205 aa, synthetic construct; identical to SEQ ID NO: 782
  REGION 1..205: note = Human CD83

SEQ ID NO: 952 - protein, 288 aa, synthetic construct; identical to SEQ ID NO: 656
  REGION 1..288: note = Human CD80

SEQ ID NO: 953 - protein, 329 aa, synthetic construct; identical to SEQ ID NO: 659
  REGION 1..329: note = Human CD86

SEQ ID NO: 954 - protein, 254 aa, synthetic construct; identical to SEQ ID NO: 783
  REGION 1..254: note = Human CD137L

SEQ ID NO: 955 - protein, 183 aa, synthetic construct; identical to SEQ ID NO: 784
  REGION 1..183: note = Human CD252

SEQ ID NO: 956 - protein, 302 aa, synthetic construct; identical to SEQ ID NO: 785
  REGION 1..302: note = Human CD275

SEQ ID NO: 957 - protein, 532 aa, synthetic construct; identical to SEQ ID NO: 786
  REGION 1..532: note = Human CD54

SEQ ID NO: 958 - protein, 1179 aa, synthetic construct; identical to SEQ ID NO: 787
  REGION 1..1179: note = Human CD49a

SEQ ID NO: 959 - protein, 538 aa, synthetic construct; identical to SEQ ID NO: 788
  REGION 1..538: note = Human CD112

SEQ ID NO: 960 - protein, 335 aa, synthetic construct; identical to SEQ ID NO: 789
  REGION 1..335: note = Human CD150

SEQ ID NO: 961 - protein, 417 aa, synthetic construct; identical to SEQ ID NO: 790
  REGION 1..417: note = Human CD155

SEQ ID NO: 962 - protein, 616 aa, synthetic construct; identical to SEQ ID NO: 791
  REGION 1..616: note = Human CD265

SEQ ID NO: 963 - protein, 283 aa, synthetic construct; identical to SEQ ID NO: 792
  REGION 1..283: note = Human CD270

SEQ ID NO: 964 - protein, 251 aa, synthetic construct; identical to SEQ ID NO: 793
  REGION 1..251: note = Human TL1A

SEQ ID NO: 965 - protein, 459 aa, synthetic construct; identical to SEQ ID NO: 794
  REGION 1..459: note = Human CD127

SEQ ID NO: 966 - protein, 825 aa, synthetic construct; identical to SEQ ID NO: 795
  REGION 1..825: note = Human IL-4R

SEQ ID NO: 967 - protein, 199 aa, synthetic construct; identical to SEQ ID NO: 796
  REGION 1..199: note = Human GITR-L

SEQ ID NO: 968 - protein, 378 aa, synthetic construct; identical to SEQ ID NO: 797
  REGION 1..378: note = Human TIM-4

SEQ ID NO: 969 - protein, 234 aa, synthetic construct; identical to SEQ ID NO: 798
  REGION 1..234: note = Human CD153

SEQ ID NO: 970 - protein, 243 aa, synthetic construct; identical to SEQ ID NO: 655
  REGION 1..243: note = Human CD48

SEQ ID NO: 971 - protein, 181 aa, synthetic construct; identical to SEQ ID NO: 651
  REGION 1..181: note = Human CD160

SEQ ID NO: 972 - protein, 325 aa, synthetic construct [sequence omitted]

SEQ ID NO: 973 - protein, 742 aa, synthetic construct; identical to SEQ ID NO: 800
  REGION 1..742: note = Human CD44

SEQ ID NO: 974 - protein, 164 aa, synthetic construct; identical to SEQ ID NO: 775
  REGION 1..164: note = Human CD3zeta

SEQ ID NO: 975 - protein, 235 aa, synthetic construct; identical to SEQ ID NO: 778
  REGION 1..235: note = Human CD8

SEQ ID NO: 976 - protein, 458 aa, synthetic construct; identical to SEQ ID NO: 779
  REGION 1..458: note = Human CD4

SEQ ID NO: 977 - protein, 86 aa, synthetic construct; identical to SEQ ID NO: 776
  REGION 1..86: note = Human FcRgamma

SEQ ID NO: 978 - protein, 317 aa, synthetic construct
  REGION 1..317: note = Human FcgammaRIIa
MTMETQMSQNVCPRNLWLLQPLTVLLLLASADSQAAAPPKAVLKLEPPWINVLQEDSVTLTCQGARSPESDSIQWFHNGNLIPTHTQPSYRFKANNNDSGEYTCQTGQTSLSDPVHLTVLSEWLVLQTPHLEFQEGETIMLRCHSWKDKPLVKVTFFQNGKSQKFSHLDPTFSIPQANHSHSGDYHCTGNIGYTLFSSKPVTITVQVPSMGSSSPMGIIVAVVIATAVAAIVAAVVALIYCRKKRISANSTDPVKAAQFEPPGRQMIAIRKRQLEETNNDYETADGGYMTLNPRAPTDDDKNIYLTLPPNDHVNSNN

SEQ ID NO: 979 - protein, 244 aa, synthetic construct
  REGION 1..244: note = Human FcRbeta
MDTESNRRANLALPQEPSSVPAFEVLEISPQEVSSGRLLKSASSPPLHTWLTVLKKEQEFLGVTQILTAMICLCFGTVVCSVLDISHIEGDIFSSFKAGYPFWGAIFFSISGMLSIISERRNATYLVRGSLGANTASSIAGGTGITILIINLKKSLAYIHIHSCQKFFETKCFMASFSTEIVVMMLFLTILGLGSAVSLTICGAGEELKGNKVPEDRVYEELNIYSATYSELEDPGEMSPPIDL

SEQ ID NO: 980 - protein, 207 aa, synthetic construct
  REGION 1..207: note = Human CD3epsilon
MQSGTHWRVLGLCLLSVGVWGQDGNEEMGGITQTPYKVSISGTTVILTCPQYPGSEILWQHNDKNIGGDEDDKNIGSDEDHLSLKEFSELEQSGYYVCYPRGSKPEDANFYLYLRARVCENCMEMDVMSVATIVIVDICITGGLLLLVYYWSKNRKAKAKPVTRGAGAGGRQRGQNKERPPPVPNPDYEPIRKGQRDLYSGLNQRRI

SEQ ID NO: 981 - protein, 226 aa, synthetic construct
  REGION 1..226: note = Human CD79a
MPGGPGVLQALPATIFLLFLLSAVYLGPGCQALWMHKVPASLMVSLGEDAHFQCPHNSSNNANVTWWRVLHGNYTWPPEFLGPGEDPNGTLIIQNVNKSHGGIYVCRVQEGNESYQQSCGTYLRVRQPPPRPFLDMGEGTKNRIITAEGIILLFCAVVPGTLLLFRKRWQNEKLGLDAGDEYEDENLYEGLNLDDCSMYEDISRGLQGTYQDVGSLNIGDVQLEKP

SEQ ID NO: 982 - protein, 229 aa, synthetic construct
  REGION 1..229: note = Human CD79b
MARLALSPVPSHWMVALLLLLSAEPVPAARSEDRYRNPKGSACSRIWQSPRFIARKRGFTVKMHCYMNSASGNVSWLWKQEMDENPQQLKLEKGRMEESQNESLATLTIQGIRFEDNGIYFCQQKCNNTSEVYQGCGTELRVMGFSTLAQLKQRNTLKDGIIMIQTLLIILFIIVPIFLLLDKDDSKAGMEEDHTYEGLDIDQTATYEDIVTLRTGEVKWSVGEHPGQE

SEQ ID NO: 983 - protein, 113 aa, synthetic construct; identical to SEQ ID NO: 777
  REGION 1..113: note = Human DAP12

SEQ ID NO: 984 - protein, 182 aa, synthetic construct
  REGION 1..182: note = Human CD3gamma
MEQGKGLAVLILAIILLQGTLAQSIKGNHLVKVYDYQEDGSVLLTCDAEAKNITWFKDGKMIGFLTEDKKKWNLGSNAKDPRGMYQCKGSQNKSKPLQVYYRMCQNCIELNAATISGFLFAEIVSIFVLAVGVYFIAGQDGVRQSRASDKQTLLPNDQLYQPLKDREDDQYSHLQGNQLRRN

SEQ ID NO: 985 - protein, 171 aa, synthetic construct
  REGION 1..171: note = Human CD3delta
MEHSTFLSGLVLATLLSQVSPFKIPIEELEDRVFVNCNTSITWVEGTVGTLLSDITRLDLGKRILDPRGIYRCNGTDIYKDKESTVQVHYRMCQSCVELDPATVAGIIVTDVIATLLLALGVFCFAGHETGRLSGAADTQALLRNDQVYQPLRDRDDAQYSHLGGNWARNK

SEQ ID NO: 986 - protein, 356 aa, synthetic construct
  REGION 1..356: note = A40C.28
QVQLVQSGAEVKKPGASVKVSCTASGFNIKDYYVHWVKQAPGQGLEWMGRIDPEDGDSKYAPKFQGKATMTADTSTSTVYMELSSLRSEDTAVYYCTTSYYVGTYGYWGQGTLVTVSSGGGGSGGGGSGGGGSDIQMTQSPSSLSASVGDRVTITCSASSSVSYMLWFQQKPGKAPKLLIYSTSNLASGVPSRFSGSGSGTDFTLTISSLQPEDFATYYCQQRTFYPYTFGGGTKVEIKRTASTTTPAPRPPTPAPTIASQPLSLRPEACRPAAGGAVHTRGLDFACDFWVLVVVGGVLACYSLLVTVAFIIFWVRSKRSRLLHSDYMNMTPRRPGPTRKHYQPYAPPRDFAAYRS

SEQ ID NO: 987 - DNA, 1071 bp, synthetic construct
  misc_feature 1..1071: note = A40C.28
  source 1..1071: mol_type = other DNA
caggtccagctggtacaatctggtgctgaagtgaagaaaccaggagcgtcggtgaaggtctcatgcacagcctcaggcttcaacatcaaggactactacgtgcactgggtcaagcaagctcccggacaggggctggagtggatggggagaattgacccggaagacggcgactcgaaatacgcgccgaagttccagggcaaggccaccatgacagccgataccagtacatcgaccgtttacatggagctgtccagcctccgctcagaggataccgcggtatactactgtacgacctcctactacgtcggaacgtacggttactggggccagggtaccctggtgacagtgtcctcggggggcggcgggtctggcgggggaggcagcgggggcggcgggtcggacatccagatgactcaatccccctcttccctgagtgcgtccgtgggtgacagggtgacgatcacttgtagcgcttcgtcctcggtgtcgtatatgctgtggttccagcagaagcccggtaaggcccccaaactgctcatttattccaccagcaacctcgccagtggcgtacccagtcgcttctccggtagtggctccggtaccgatttcacactgaccatctccagtctgcaacctgaagacttcgcaacgtactattgtcagcagcgcacattctatccctatacgtttgggggcgggaccaaggtcgagatcaagcgcacagctagcaccacgacgccagcgccgcgaccaccaacaccggcgcccaccatcgcgtcgcagcccctgtccctgcgcccagaggcgtgccggccagcggcggggggcgcagtgcacacgagggggctggacttcgcctgtgatttttgggtgctggtggtggttggtggagtcctggcttgctatagcttgctagtaacagtggcctttattattttctgggtgaggagtaagaggagcaggctcctgcacagtgactacatgaacatgactccccgccgccccgggcccacccgcaagcattaccagccctatgccccaccacgcgacttcgcagcctatcgctcctaa

SEQ ID NO: 988 - protein, 266 aa, synthetic construct; identical to SEQ ID NO: 674
  REGION 1..266: note = 1412 scFV

SEQ ID NO: 989 - protein, 120 aa, synthetic construct; identical to SEQ ID NO: 675
  REGION 1..120: note = 1412 heavy chain variable domain

SEQ ID NO: 990 - protein, 110 aa, synthetic construct; identical to SEQ ID NO: 676
  REGION 1..110: note = 1412 light chain variable domain

SEQ ID NO: 991 - protein, 45 aa, synthetic construct; identical to SEQ ID NO: 671
  REGION 1..45: note = CD8 hinge

SEQ ID NO: 992 - protein, 43 aa, synthetic construct; identical to SEQ ID NO: 672
  REGION 1..43: note = CD28 hinge

SEQ ID NO: 993 - protein, 35 aa, synthetic construct; identical to SEQ ID NO: 673
  REGION 1..35: note = IgG Fc hinge

SEQ ID NO: 994 - protein, 522 aa, synthetic construct; identical to SEQ ID NO: 826
  REGION 1..522: note = 4D5-6.CD3 AA

SEQ ID NO: 995 - DNA, 1569 bp, synthetic construct; identical to SEQ ID NO: 827
  misc_feature 1..1569: note = 4D5-6.CD3 NT
  source 1..1569: mol_type = other DNA

SEQ ID NO: 996 - protein, 372 aa, synthetic construct; identical to SEQ ID NO: 805
  REGION 1..372: note = CD27 CAR

SEQ ID NO: 997 - protein, 486 aa, synthetic construct; identical to SEQ ID NO: 710
  REGION 1..486: note = FMC63 CAR

SEQ ID NO: 998 - DNA, 1461 bp, synthetic construct; identical to SEQ ID NO: 749
  misc_feature 1..1461: note = FMC63 CAR Nucleotide sequence:
  source 1..1461: mol_type = other DNA

SEQ ID NO: 999 - DNA, 1949 bp, synthetic construct
  misc_feature 1..1949: note = FMC63 CAR linear mRNA
  source 1..1949: mol_type = other DNA
taatacgactcactatagggaaagctcgagtctagagccgccatggccttaccagtgaccgccttgctcctgccgctggccttgctgctccacgccgccaggccggacatccagatgacacagactacatcctccctgtctgcctctctgggagacagagtcaccatcagttgcagggcaagtcaggacattagtaaatatttaaattggtatcagcagaaaccagatggaactgttaaactcctgatctaccatacatcaagattacactcaggagtcccatcaaggttcagtggcagtgggtctggaacagattattctctcaccattagcaacctggagcaagaagatattgccacttacttttgccaacagggtaatacgcttccgtacacgttcggaggggggaccaagctggagatcacaggtggcggtggctcgggcggtggtgggtcgggtggcggcggatctgaggtgaaactgcaggagtcaggacctggcctggtggcgccctcacagagcctgtccgtcacatgcactgtctcaggggtctcattacccgactatggtgtaagctggattcgccagcctccacgaaagggtctggagtggctgggagtaatatggggtagtgaaaccacatactataattcagctctcaaatccagactgaccatcatcaaggacaactccaagagccaagttttcttaaaaatgaacagtctgcaaactgatgacacagccatttactactgtgccaaacattattactacggtggtagctatgctatggactactggggccaaggaacctcagtcaccgtctcctcaaccacgacgccagcgccgcgaccaccaacaccggcgcccaccatcgcgtcgcagcccctgtccctgcgcccagaggcgtgccggccagcggcggggggcgcagtgcacacgagggggctggacttcgcctgtgatatctacatctgggcgcccttggccgggacttgtggggtccttctcctgtcactggttatcaccctttactgcaaacggggcagaaagaaactcctgtatatattcaaacaaccatttatgagaccagtacaaactactcaagaggaagatggctgtagctgccgatttccagaagaagaagaaggaggatgtgaactgagagtgaagttcagcaggagcgcagacgcccccgcgtacaagcagggccagaaccagctctataacgagctcaatctaggacgaagagaggagtacgatgttttggacaagagacgtggccgggaccctgagatggggggaaagccgagaaggaagaaccctcaggaaggcctgtacaatgaactgcagaaagataagatggcggaggcctacagtgagattgggatgaaaggcgagcgccggaggggcaaggggcacgatggcctttaccagggtctcagtacagccaccaaggacacctacgacgcccttcacatgcaggccctgccccctcgctaagtcgacagctcgctttcttgctgtccaatttctattaaaggttcctttgttccctaagtccaactactaaactgggggatattatgaagggccttgagcatctggattctgcctaataaaaaacatttattttcattgctgcgtcgagagctcgctttcttgctgtccaatttctattaaaggttcctttgttccctaagtccaactactaaactgggggatattatgaagggccttgagcatctggattctgcctaataaaaaacatttattttcattgctgcctcgacgaattcaaaaaaaaaaaaaaaaaaaaaaaaaaaaaaaaaaaaaaaaaaaaaaaaaaaaaaaaaaaaaaaaaaaaaaaaaaaaaaaaaaaaaaaaaaaaaaaaaaaaaaaaaaaaaaaaaaaaaaaaaaaaaaaaaaaaaaaaaaaaaaaaaaaaaa

SEQ ID NO: 1000 - DNA, 2729 bp, synthetic construct
  misc_feature 1..2729: note = FMC63 CAR circRNA
  source 1..2729: mol_type = other DNA
taatacgactcactataggggagaccctcgaccgtcgattgtccactggtcaacaatagatgacttacaactaatcggaaggtgcagagactcgacgggagctaccctaacgtcaagacgagggtaaagagagagtccaattctcaaagccaataggcagtagcgaaagctgcaagagaatgaaaatccgttgaccttaaacggtcgtgtgggttcaagtccctccacccccacgccggaaacgcaatagccgaaaaacaaaaaacaaaaaaaacaaaaaaaaaaccaaaaaaacaaaacacattaaaacagcctgtgggttgatcccacccacaggcccattgggcgctagcactctggtatcacggtacctttgtgcgcctgttttataccccctcccccaactgtaacttagaagtaacacacaccgatcaacagtcagcgtggcacaccagccacgttttgatcaagcacttctgttaccccggactgagtatcaatagactgctcacgcggttgaaggagaaagcgttcgttatccggccaactacttcgaaaaacctagtaacaccgtggaagttgcagagtgtttcgctcagcactaccccagtgtagatcaggtcgatgagtcaccgcattccccacgggcgaccgtggcggtggctgcgttggcggcctgcccatggggaaacccatgggacgctctaatacagacatggtgcgaagagtctattgagctagttggtagtcctccggcccctgaatgcggctaatcctaactgcggagcacacaccctcaagccagagggcagtgtgtcgtaacgggcaactctgcagcggaaccgactactttgggtgtccgtgtttcattttattcctatactggctgcttatggtgacaattgagagatcgttaccatatagctattggattggccatccggtgactaatagagctattatatatccctttgttgggtttataccacttagcttgaaagaggttaaaacattacaattcattgttaagttgaatacagcaaatctagagccaccatggccttaccagtgaccgccttgctcctgccgctggccttgctgctccacgccgccaggccggacatccagatgacacagactacatcctccctgtctgcctctctgggagacagagtcaccatcagttgcagggcaagtcaggacattagtaaatatttaaattggtatcagcagaaaccagatggaactgttaaactcctgatctaccatacatcaagattacactcaggagtcccatcaaggttcagtggcagtgggtctggaacagattattctctcaccattagcaacctggagcaagaagatattgccacttacttttgccaacagggtaatacgcttccgtacacgttcggaggggggaccaagctggagatcacaggtggcggtggctcgggcggtggtgggtcgggtggcggcggatctgaggtgaaactgcaggagtcaggacctggcctggtggcgccctcacagagcctgtccgtcacatgcactgtctcaggggtctcattacccgactatggtgtaagctggattcgccagcctccacgaaagggtctggagtggctgggagtaatatggggtagtgaaaccacatactataattcagctctcaaatccagactgaccatcatcaaggacaactccaagagccaagttttcttaaaaatgaacagtctgcaaactgatgacacagccatttactactgtgccaaacattattactacggtggtagctatgctatggactactggggccaaggaacctcagtcaccgtctcctcaaccacgacgccagcgccgcgaccaccaacaccggcgcccaccatcgcgtcgcagcccctgtccctgcgcccagaggcgtgccggccagcggcggggggcgcagtgcacacgagggggctggacttcgcctgtgatatctacatctgggcgcccttggccgggacttgtggggtccttctcctgtcactggttatcaccctttactgcaaacggggcagaaagaaactcctgtatatattcaaacaaccatttatgagaccagtacaaactactcaagaggaagatggctgtagctgccgatttccagaagaagaagaaggaggatgtgaactgagagtgaagttcagcaggagcgcagacgcccccgcgtacaagcagggccagaaccagctctataacgagctcaatctaggacgaagagaggagtacgatgttttggacaagagacgtggccgggaccctgagatggggggaaagccgagaaggaagaaccctcaggaaggcctgtacaatgaactgcagaaagataagatggcggaggcctacagtgagattgggatgaaaggcgagcgccggaggggcaaggggcacgatggcctttaccagggtctcagtacagccaccaaggacacctacgacgcccttcacatgcaggccctgccccctcgctaagtcgacaaaaaacaaaaaacaaaacggctattatgcgttaccggcgagacgctacggacttaaataattgagccttaaagaagaaattctttaagtggatgctctcaaactcagggaaacctaaatctagttatagacaaggcaatcctgagccaagccgaagtagtaattagtaagaccagtggacaatcgacggataacagcatatctag

SEQ ID NO: 1001 - DNA, 2793 bp, synthetic construct
  misc_feature 1..2793: note = FMC63 CAR circRNA-70A
  source 1..2793: mol_type = other DNA
taatacgactcactataggggagaccctcgaccgtcgattgtccactggtcaacaatagatgacttacaactaatcggaaggtgcagagactcgacgggagctaccctaacgtcaagacgagggtaaagagagagtccaattctcaaagccaataggcagtagcgaaagctgcaagagaatgaaaatccgttgaccttaaacggtcgtgtgggttcaagtccctccacccccacgccggaaacgcaatagccgaaaaacaaaaaacaaaaaaaacaaaaaaaaaaccaaaaaaacaaaacacattaaaacagcctgtgggttgatcccacccacaggcccattgggcgctagcactctggtatcacggtacctttgtgcgcctgttttataccccctcccccaactgtaacttagaagtaacacacaccgatcaacagtcagcgtggcacaccagccacgttttgatcaagcacttctgttaccccggactgagtatcaatagactgctcacgcggttgaaggagaaagcgttcgttatccggccaactacttcgaaaaacctagtaacaccgtggaagttgcagagtgtttcgctcagcactaccccagtgtagatcaggtcgatgagtcaccgcattccccacgggcgaccgtggcggtggctgcgttggcggcctgcccatggggaaacccatgggacgctctaatacagacatggtgcgaagagtctattgagctagttggtagtcctccggcccctgaatgcggctaatcctaactgcggagcacacaccctcaagccagagggcagtgtgtcgtaacgggcaactctgcagcggaaccgactactttgggtgtccgtgtttcattttattcctatactggctgcttatggtgacaattgagagatcgttaccatatagctattggattggccatccggtgactaatagagctattatatatccctttgttgggtttataccacttagcttgaaagaggttaaaacattacaattcattgttaagttgaatacagcaaatctagagccaccatggccttaccagtgaccgccttgctcctgccgctggccttgctgctccacgccgccaggccggacatccagatgacacagactacatcctccctgtctgcctctctgggagacagagtcaccatcagttgcagggcaagtcaggacattagtaaatatttaaattggtatcagcagaaaccagatggaactgttaaactcctgatctaccatacatcaagattacactcaggagtcccatcaaggttcagtggcagtgggtctggaacagattattctctcaccattagcaacctggagcaagaagatattgccacttacttttgccaacagggtaatacgcttccgtacacgttcggaggggggaccaagctggagatcacaggtggcggtggctcgggcggtggtgggtcgggtggcggcggatctgaggtgaaactgcaggagtcaggacctggcctggtggcgccctcacagagcctgtccgtcacatgcactgtctcaggggtctcattacccgactatggtgtaagctggattcgccagcctccacgaaagggtctggagtggctgggagtaatatggggtagtgaaaccacatactataattcagctctcaaatccagactgaccatcatcaaggacaactccaagagccaagttttcttaaaaatgaacagtctgcaaactgatgacacagccatttactactgtgccaaacattattactacggtggtagctatgctatggactactggggccaaggaacctcagtcaccgtctcctcaaccacgacgccagcgccgcgaccaccaacaccggcgcccaccatcgcgtcgcagcccctgtccctgcgcccagaggcgtgccggccagcggcggggggcgcagtgcacacgagggggctggacttcgcctgtgatatctacatctgggcgcccttggccgggacttgtggggtccttctcctgtcactggttatcaccctttactgcaaacggggcagaaagaaactcctgtatatattcaaacaaccatttatgagaccagtacaaactactcaagaggaagatggctgtagctgccgatttccagaagaagaagaaggaggatgtgaactgagagtgaagttcagcaggagcgcagacgcccccgcgtacaagcagggccagaaccagctctataacgagctcaatctaggacgaagagaggagtacgatgttttggacaagagacgtggccgggaccctgagatggggggaaagccgagaaggaagaaccctcaggaaggcctgtacaatgaactgcagaaagataagatggcggaggcctacagtgagattgggatgaaaggcgagcgccggaggggcaaggggcacgatggcctttaccagggtctcagtacagccaccaaggacacctacgacgcccttcacatgcaggccctgccccctcgctaagtcgacaaaaaaaaaaaaaaaaaaaaaaaaaaaaaaaaaaaaaaaaaaaaaaaaaaaaaaaaaaaaaaaaaaaaaacaaaaaacaaaacggctattatgcgttaccggcgagacgctacggacttaaataattgagccttaaagaagaaattctttaagtggatgctctcaaactcagggaaacctaaatctagttatagacaaggcaatcctgagccaagccgaagtagtaattagtaagaccagtggacaatcgacggataacagcatatctag

SEQ ID NO: 1002 - protein, 486 aa, synthetic construct; identical to SEQ ID NO: 256
  REGION 1..486: note = BCMA CAR-31

SEQ ID NO: 1003 - DNA, 1461 bp, synthetic construct
  misc_feature 1..1461: note = BCMA CAR-31 Nucleotide sequence:
  source 1..1461: mol_type = other DNA
atgctgctgctggtgaccagcctgctgctgtgcgagctgccccaccccgcctttctgctgatcccccaatctgccctgactcagcctccctccgcgtccgggtctcctggacagtcagtcaccatctcctgcactggaaccagcagtgacgttggtacttataattatgtctcctggtaccaacaacacccaggcaaagcccccaagctcatgatttatgacgtcaatcagcggccctcaggggtccctgatcgcttctctggctccaagtctggcaacacggcctccctgaccgtctctgggctccaggctgaggatgaggctgattattactgcagctcatatggaggcagcaacaatttggtattcggcggagggaccaaggtcaccgtcctaggtggtggtggttctggcggcggcggctccggaggtggtggatccgaagtgcaactggtggagtctgggggaggcttgatccagcctggggggtccctgagactctcctgtgcagcctctggattcacctttagtagctattggatgagctgggtccgccaaagtccagggaaggggctggagtgggtggccaacataaagccagatggaagtgacaaatactatgtggactctgtgaagggccgattcaccatctccagagacaacgccaagaactcactggatctgcaaatgaacagcctgagaggcgaagacacggctatttattactgcgcgagaggtgccaccacctatggctcctggggccagggaaccctggtcactgtctcctcaaccactaccccagcaccgcggccacccaccccggctcctaccatcgcctcccagcctctgtccctgcgtccggaggcatgtagacccgcagctggtggggccgtgcatacccggggtcttgacttcgcctgcgatatctacatttgggcccctctggctggtacttgcggggtcctgctgctttcactcgtgatcactctttactgtaaacggggcagaaagaaactcctgtatatattcaaacaaccatttatgagaccagtacaaactactcaagaggaagatggctgtagctgccgatttccagaagaagaagaaggaggatgtgaactgagagtgaagttcagcaggagcgcagacgcccccgcgtaccagcagggccagaaccagctctataacgagctcaatctaggacgaagagaggagtacgatgttttggacaagagacgtggccgggaccctgagatggggggaaagccgagaaggaagaaccctcaggaaggcctgtacaatgaactgcagaaagataagatggcggaggcctacagtgagattgggatgaaaggcgagcgccggaggggcaaggggcacgatggcctttaccagggtctcagtacagccaccaaggacacctacgacgcccttcacatgcaggccctgccccctcgctaa

SEQ ID NO: 1004 - DNA, 1949 bp, synthetic construct
  misc_feature 1..1949: note = BCMA CAR-31 linear mRNA
  source 1..1949: mol_type = other DNA
taatacgactcactatagggaaagctcgagtctagagccgccatgctgctgctggtgaccagcctgctgctgtgcgagctgccccaccccgcctttctgctgatcccccaatctgccctgactcagcctccctccgcgtccgggtctcctggacagtcagtcaccatctcctgcactggaaccagcagtgacgttggtacttataattatgtctcctggtaccaacaacacccaggcaaagcccccaagctcatgatttatgacgtcaatcagcggccctcaggggtccctgatcgcttctctggctccaagtctggcaacacggcctccctgaccgtctctgggctccaggctgaggatgaggctgattattactgcagctcatatggaggcagcaacaatttggtattcggcggagggaccaaggtcaccgtcctaggtggtggtggttctggcggcggcggctccggaggtggtggatccgaagtgcaactggtggagtctgggggaggcttgatccagcctggggggtccctgagactctcctgtgcagcctctggattcacctttagtagctattggatgagctgggtccgccaaagtccagggaaggggctggagtgggtggccaacataaagccagatggaagtgacaaatactatgtggactctgtgaagggccgattcaccatctccagagacaacgccaagaactcactggatctgcaaatgaacagcctgagaggcgaagacacggctatttattactgcgcgagaggtgccaccacctatggctcctggggccagggaaccctggtcactgtctcctcaaccactaccccagcaccgcggccacccaccccggctcctaccatcgcctcccagcctctgtccctgcgtccggaggcatgtagacccgcagctggtggggccgtgcatacccggggtcttgacttcgcctgcgatatctacatttgggcccctctggctggtacttgcggggtcctgctgctttcactcgtgatcactctttactgtaaacggggcagaaagaaactcctgtatatattcaaacaaccatttatgagaccagtacaaactactcaagaggaagatggctgtagctgccgatttccagaagaagaagaaggaggatgtgaactgagagtgaagttcagcaggagcgcagacgcccccgcgtaccagcagggccagaaccagctctataacgagctcaatctaggacgaagagaggagtacgatgttttggacaagagacgtggccgggaccctgagatggggggaaagccgagaaggaagaaccctcaggaaggcctgtacaatgaactgcagaaagataagatggcggaggcctacagtgagattgggatgaaaggcgagcgccggaggggcaaggggcacgatggcctttaccagggtctcagtacagccaccaaggacacctacgacgcccttcacatgcaggccctgccccctcgctaagtcgacagctcgctttcttgctgtccaatttctattaaaggttcctttgttccctaagtccaactactaaactgggggatattatgaagggccttgagcatctggattctgcctaataaaaaacatttattttcattgctgcgtcgagagctcgctttcttgctgtccaatttctattaaaggttcctttgttccctaagtccaactactaaactgggggatattatgaagggccttgagcatctggattctgcctaataaaaaacatttattttcattgctgcctcgacgaattcaaaaaaaaaaaaaaaaaaaaaaaaaaaaaaaaaaaaaaaaaaaaaaaaaaaaaaaaaaaaaaaaaaaaaaaaaaaaaaaaaaaaaaaaaaaaaaaaaaaaaaaaaaaaaaaaaaaaaaaaaaaaaaaaaaaaaaaaaaaaaaaaaaaaaa

SEQ ID NO: 1005 - DNA, 2729 bp, synthetic construct
  misc_feature 1..2729: note = BCMA CAR-31 circRNA
  source 1..2729: mol_type = other DNA
taatacgactcactataggggagaccctcgaccgtcgattgtccactggtcaacaatagatgacttacaactaatcggaaggtgcagagactcgacgggagctaccctaacgtcaagacgagggtaaagagagagtccaattctcaaagccaataggcagtagcgaaagctgcaagagaatgaaaatccgttgaccttaaacggtcgtgtgggttcaagtccctccacccccacgccggaaacgcaatagccgaaaaacaaaaaacaaaaaaaacaaaaaaaaaaccaaaaaaacaaaacacattaaaacagcctgtgggttgatcccacccacaggcccattgggcgctagcactctggtatcacggtacctttgtgcgcctgttttataccccctcccccaactgtaacttagaagtaacacacaccgatcaacagtcagcgtggcacaccagccacgttttgatcaagcacttctgttaccccggactgagtatcaatagactgctcacgcggttgaaggagaaagcgttcgttatccggccaactacttcgaaaaacctagtaacaccgtggaagttgcagagtgtttcgctcagcactaccccagtgtagatcaggtcgatgagtcaccgcattccccacgggcgaccgtggcggtggctgcgttggcggcctgcccatggggaaacccatgggacgctctaatacagacatggtgcgaagagtctattgagctagttggtagtcctccggcccctgaatgcggctaatcctaactgcggagcacacaccctcaagccagagggcagtgtgtcgtaacgggcaactctgcagcggaaccgactactttgggtgtccgtgtttcattttattcctatactggctgcttatggtgacaattgagagatcgttaccatatagctattggattggccatccggtgactaatagagctattatatatccctttgttgggtttataccacttagcttgaaagaggttaaaacattacaattcattgttaagttgaatacagcaaatctagagccaccatgctgctgctggtgaccagcctgctgctgtgcgagctgccccaccccgcctttctgctgatcccccaatctgccctgactcagcctccctccgcgtccgggtctcctggacagtcagtcaccatctcctgcactggaaccagcagtgacgttggtacttataattatgtctcctggtaccaacaacacccaggcaaagcccccaagctcatgatttatgacgtcaatcagcggccctcaggggtccctgatcgcttctctggctccaagtctggcaacacggcctccctgaccgtctctgggctccaggctgaggatgaggctgattattactgcagctcatatggaggcagcaacaatttggtattcggcggagggaccaaggtcaccgtcctaggtggtggtggttctggcggcggcggctccggaggtggtggatccgaagtgcaactggtggagtctgggggaggcttgatccagcctggggggtccctgagactctcctgtgcagcctctggattcacctttagtagctattggatgagctgggtccgccaaagtccagggaaggggctggagtgggtggccaacataaagccagatggaagtgacaaatactatgtggactctgtgaagggccgattcaccatctccagagacaacgccaagaactcactggatctgcaaatgaacagcctgagaggcgaagacacggctatttattactgcgcgagaggtgccaccacctatggctcctggggccagggaaccctggtcactgtctcctcaaccactaccccagcaccgcggccacccaccccggctcctaccatcgcctcccagcctctgtccctgcgtccggaggcatgtagacccgcagctggtggggccgtgcatacccggggtcttgacttcgcctgcgatatctacatttgggcccctctggctggtacttgcggggtcctgctgctttcactcgtgatcactctttactgtaaacggggcagaaagaaactcctgtatatattcaaacaaccatttatgagaccagtacaaactactcaagaggaagatggctgtagctgccgatttccagaagaagaagaaggaggatgtgaactgagagtgaagttcagcaggagcgcagacgcccccgcgtaccagcagggccagaaccagctctataacgagctcaatctaggacgaagagaggagtacgatgttttggacaagagacgtggccgggaccctgagatggggggaaagccgagaaggaagaaccctcaggaaggcctgtacaatgaactgcagaaagataagatggcggaggcctacagtgagattgggatgaaaggcgagcgccggaggggcaaggggcacgatggcctttaccagggtctcagtacagccaccaaggacacctacgacgcccttcacatgcaggccctgccccctcgctaagtcgacaaaaaacaaaaaacaaaacggctattatgcgttaccggcgagacgctacggacttaaataattgagccttaaagaagaaattctttaagtggatgctctcaaactcagggaaacctaaatctagttatagacaaggcaatcctgagccaagccgaagtagtaattagtaagaccagtggacaatcgacggataacagcatatctag

SEQ ID NO: 1006 - DNA, 2793 bp, synthetic construct
  misc_feature 1..2793: note = BCMA CAR-31 circRNA-70A
  source 1..2793: mol_type = other DNA
taatacgactcactataggggagaccctcgaccgtcgattgtccactggtcaacaatagatgacttacaactaatcggaaggtgcagagactcgacgggagctaccctaacgtcaagacgagggtaaagagagagtccaattctcaaagccaataggcagtagcgaaagctgcaagagaatgaaaatccgttgaccttaaacggtcgtgtgggttcaagtccctccacccccacgccggaaacgcaatagccgaaaaacaaaaaacaaaaaaaacaaaaaaaaaaccaaaaaaacaaaacacattaaaacagcctgtgggttgatcccacccacaggcccattgggcgctagcactctggtatcacggtacctttgtgcgcctgttttataccccctcccccaactgtaacttagaagtaacacacaccgatcaacagtcagcgtggcacaccagccacgttttgatcaagcacttctgttaccccggactgagtatcaatagactgctcacgcggttgaaggagaaagcgttcgttatccggccaactacttcgaaaaacctagtaacaccgtggaagttgcagagtgtttcgctcagcactaccccagtgtagatcaggtcgatgagtcaccgcattccccacgggcgaccgtggcggtggctgcgttggcggcctgcccatggggaaacccatgggacgctctaatacagacatggtgcgaagagtctattgagctagttggtagtcctccggcccctgaatgcggctaatcctaactgcggagcacacaccctcaagccagagggcagtgtgtcgtaacgggcaactctgcagcggaaccgactactttgggtgtccgtgtttcattttattcctatactggctgcttatggtgacaattgagagatcgttaccatatagctattggattggccatccggtgactaatagagctattatatatccctttgttgggtttataccacttagcttgaaagaggttaaaacattacaattcattgttaagttgaatacagcaaatctagagccaccatgctgctgctggtgaccagcctgctgctgtgcgagctgccccaccccgcctttctgctgatcccccaatctgccctgactcagcctccctccgcgtccgggtctcctggacagtcagtcaccatctcctgcactggaaccagcagtgacgttggtacttataattatgtctcctggtaccaacaacacccaggcaaagcccccaagctcatgatttatgacgtcaatcagcggccctcaggggtccctgatcgcttctctggctccaagtctggcaacacggcctccctgaccgtctctgggctccaggctgaggatgaggctgattattactgcagctcatatggaggcagcaacaatttggtattcggcggagggaccaaggtcaccgtcctaggtggtggtggttctggcggcggcggctccggaggtggtggatccgaagtgcaactggtggagtctgggggaggcttgatccagcctggggggtccctgagactctcctgtgcagcctctggattcacctttagtagctattggatgagctgggtccgccaaagtccagggaaggggctggagtgggtggccaacataaagccagatggaagtgacaaatactatgtggactctgtgaagggccgattcaccatctccagagacaacgccaagaactcactggatctgcaaatgaacagcctgagaggcgaagacacggctatttattactgcgcgagaggtgccaccacctatggctcctggggccagggaaccctggtcactgtctcctcaaccactaccccagcaccgcggccacccaccccggctcctaccatcgcctcccagcctctgtccctgcgtccggaggcatgtagacccgcagctggtggggccgtgcatacccggggtcttgacttcgcctgcgatatctacatttgggcccctctggctggtacttgcggggtcctgctgctttcactcgtgatcactctttactgtaaacggggcagaaagaaactcctgtatatattcaaacaaccatttatgagaccagtacaaactactcaagaggaagatggctgtagctgccgatttccagaagaagaagaaggaggatgtgaactgagagtgaagttcagcaggagcgcagacgcccccgcgtaccagcagggccagaaccagctctataacgagctcaatctaggacgaagagaggagtacgatgttttggacaagagacgtggccgggaccctgagatggggggaaagccgagaaggaagaaccctcaggaaggcctgtacaatgaactgcagaaagataagatggcggaggcctacagtgagattgggatgaaaggcgagcgccggaggggcaaggggcacgatggcctttaccagggtctcagtacagccaccaaggacacctacgacgcccttcacatgcaggccctgccccctcgctaagtcgacaaaaaaaaaaaaaaaaaaaaaaaaaaaaaaaaaaaaaaaaaaaaaaaaaaaaaaaaaaaaaaaaaaaaaacaaaaaacaaaacggctattatgcgttaccggcgagacgctacggacttaaataattgagccttaaagaagaaattctttaagtggatgctctcaaactcagggaaacctaaatctagttatagacaaggcaatcctgagccaagccgaagtagtaattagtaagaccagtggacaatcgacggataacagcatatctag

SEQ ID NO: 1007 - DNA, 18 bp, synthetic construct
  misc_feature 1..18: note = T7 Promotor
  source 1..18: mol_type = other DNA
taatacgactcactatag

SEQ ID NO: 1008 - DNA, 33 bp, synthetic construct; identical to SEQ ID NO: 587
  misc_feature 1..33: note = Homology arm-1
  source 1..33: mol_type = other DNA

SEQ ID NO: 1009 - DNA, 182 bp, synthetic construct; identical to SEQ ID NO: 588
  misc_feature 1..182: note = Anabaena intron-1
  source 1..182: mol_type = other DNA

SEQ ID NO: 1010 - DNA, 40 bp, synthetic construct; identical to SEQ ID NO: 589
  misc_feature 1..40: note = Spacer-1
  source 1..40: mol_type = other DNA

SEQ ID NO: 1011 - DNA, 741 bp, synthetic construct; identical to SEQ ID NO: 590
  misc_feature 1..741: note = CVB3 IRES
  source 1..741: mol_type = other DNA

SEQ ID NO: 1012 - DNA, 40 bp, synthetic construct; identical to SEQ ID NO: 591
  misc_feature 1..40: note = Spacer-2
  source 1..40: mol_type = other DNA

SEQ ID NO: 1013 - DNA, 131 bp, synthetic construct; identical to SEQ ID NO: 592
  misc_feature 1..131: note = Anabaena intron-2
  source 1..131: mol_type = other DNA

SEQ ID NO: 1014 - DNA, 35 bp, synthetic construct; identical to SEQ ID NO: 593
  misc_feature 1..35: note = Homology arm-2
  source 1..35: mol_type = other DNA

SEQ ID NO: 1015 - DNA, 70 bp, synthetic construct; identical to SEQ ID NO: 595
  misc_feature 1..70: note = 70A
  source 1..70: mol_type = other DNA

SEQ ID NO: 1016 - protein, 21 aa, synthetic construct
  REGION 1..21: note = Signal peptide 1
MALPVTALLLPLALLLHAARP

SEQ ID NO: 1017 - protein, 22 aa, synthetic construct
  REGION 1..22: note = Signal peptide 2
MLLLVTSLLLCELPHPAFLLIP

SEQ ID NO: 1018 - protein, 24 aa, synthetic construct
  REGION 1..24: note = CD8 transmembrane domain
IYIWAPLAGTCGVLLLSLVITLYC

SEQ ID NO: 1019 - protein, 112 aa, synthetic construct
  REGION 1..112: note = CD3-zeta
RVKFSRSADAPAYKQGQNQLYNELNLGRREEYDVLDKRRGRDPEMGGKPRRKNPQEGLYNELQKDKMAEAYSEIGMKGERRRGKGHDGLYQGLSTATKDTYDALHMQALPPR

1. A circular RNA comprising, in the following order, an internal ribosome entry site (IRES) element, a protein coding sequence and a poly A.

2. The circular RNA of claim 1, wherein the polyA is at least 45 or at least 70 nucleotides in length.

3.-4. (canceled)

5. The circular RNA of claim 1, wherein the protein comprises an antigen, an antibody, a chimeric antigen receptor (CAR) or a T cell receptor (TCR).

6. (canceled)

7. The circular RNA of claim 5, wherein the protein comprises an antibody or a CAR comprising the antibody as a binding domain, wherein the antibody specifically binds to mesothelin, CD123, BCMA, CD19, HER2, IL13Ra2, B7H3 or CD40.

8. The circular RNA of claim 7, wherein the antibody specifically binding to mesothelin includes a light chain variable region comprising LCDR1, LCDR2 and LCDR3 and a heavy chain variable region comprising HCDR1, HCDR2, and HCDR3, wherein LCDR1, LCDR2, LCDR3, HCDR1, HCDR2, and HCDR3 are selected from the following group:
(1) a LCDR1 as set forth in SEQ ID NO: 1, a LCDR2 as set forth in SEQ ID NO: 16, a LCDR3 as set forth in SEQ ID NO: 30, a HCDR1 as set forth in SEQ ID NO: 45, a HCDR2 as set forth in SEQ ID NO: 58 and a HCDR3 as set forth in SEQ ID NO: 71;
(2) a LCDR1 as set forth in SEQ ID NO: 2, a LCDR2 as set forth in SEQ ID NO: 17, a LCDR3 as set forth in SEQ ID NO: 31, a HCDR1 as set forth in SEQ ID NO: 46, a HCDR2 as set forth in SEQ ID NO: 59 and a HCDR3 as set forth in SEQ ID NO: 72;
(3) a LCDR1 as set forth in SEQ ID NO: 3, a LCDR2 as set forth in SEQ ID NO: 18, a LCDR3 as set forth in SEQ ID NO: 32, a HCDR1 as set forth in SEQ ID NO: 47, a HCDR2 as set forth in SEQ ID NO: 60 and a HCDR3 as set forth in SEQ ID NO: 73;
(4) a LCDR1 as set forth in SEQ ID NO: 4, a LCDR2 as set forth in SEQ ID NO: 19, a LCDR3 as set forth in SEQ ID NO: 33, a HCDR1 as set forth in SEQ ID NO: 48, a HCDR2 as set forth in SEQ ID NO: 61 and a HCDR3 as set forth in SEQ ID NO: 74;
(5) a LCDR1 as set forth in SEQ ID NO: 5, a LCDR2 as set forth in SEQ ID NO: 20, a LCDR3 as set forth in SEQ ID NO: 34, a HCDR1 as set forth in SEQ ID NO: 49, a HCDR2 as set forth in SEQ ID NO: 62 and a HCDR3 as set forth in SEQ ID NO: 75;
(6) a LCDR1 as set forth in SEQ ID NO: 6, a LCDR2 as set forth in SEQ ID NO: 21, a LCDR3 as set forth in SEQ ID NO: 35, a HCDR1 as set forth in SEQ ID NO: 50, a HCDR2 as set forth in SEQ ID NO: 63 and a HCDR3 as set forth in SEQ ID NO: 76;
(7) a LCDR1 as set forth in SEQ ID NO: 7, a LCDR2 as set forth in SEQ ID NO: 22, a LCDR3 as set forth in SEQ ID NO: 36, a HCDR1 as set forth in SEQ ID NO: 51, a HCDR2 as set forth in SEQ ID NO: 64 and a HCDR3 as set forth in SEQ ID NO: 77;
(8) a LCDR1 as set forth in SEQ ID NO: 8, a LCDR2 as set forth in SEQ ID NO: 23, a LCDR3 as set forth in SEQ ID NO: 37, a HCDR1 as set forth in SEQ ID NO: 52, a HCDR2 as set forth in SEQ ID NO: 65 and a HCDR3 as set forth in SEQ ID NO: 78;
(9) a LCDR1 as set forth in SEQ ID NO: 9, a LCDR2 as set forth in SEQ ID NO: 24, a LCDR3 as set forth in SEQ ID NO: 38, a HCDR1 as set forth in SEQ ID NO: 53, a HCDR2 as set forth in SEQ ID NO: 66 and a HCDR3 as set forth in SEQ ID NO: 79;
(10) a LCDR1 as set forth in SEQ ID NO: 10, a LCDR2 as set forth in SEQ ID NO: 25, a LCDR3 as set forth in SEQ ID NO: 39, a HCDR1 as set forth in SEQ ID NO: 48, a HCDR2 as set forth in SEQ ID NO: 61 and a HCDR3 as set forth in SEQ ID NO: 80;
(11) a LCDR1 as set forth in SEQ ID NO: 11, a LCDR2 as set forth in SEQ ID NO: 26, a LCDR3 as set forth in SEQ ID NO: 40, a HCDR1 as set forth in SEQ ID NO: 54, a HCDR2 as set forth in SEQ ID NO: 67 and a HCDR3 as set forth in SEQ ID NO: 81;
(12) a LCDR1 as set forth in SEQ ID NO: 12, a LCDR2 as set forth in SEQ ID NO: 27, a LCDR3 as set forth in SEQ ID NO: 41, a HCDR1 as set forth in SEQ ID NO: 53, a HCDR2 as set forth in SEQ ID NO: 66 and a HCDR3 as set forth in SEQ ID NO: 82;
(13) a LCDR1 as set forth in SEQ ID NO: 13, a LCDR2 as set forth in SEQ ID NO: 28, a LCDR3 as set forth in SEQ ID NO: 42, a HCDR1 as set forth in SEQ ID NO: 55, a HCDR2 as set forth in SEQ ID NO: 68 and a HCDR3 as set forth in SEQ ID NO: 83;
(14) a LCDR1 as set forth in SEQ ID NO: 14, a LCDR2 as set forth in SEQ ID NO: 29, a LCDR3 as set forth in SEQ ID NO: 43, a HCDR1 as set forth in SEQ ID NO: 56, a HCDR2 as set forth in SEQ ID NO: 69 and a HCDR3 as set forth in SEQ ID NO: 84; and
(15) a LCDR1 as set forth in SEQ ID NO: 15, a LCDR2 as set forth in SEQ ID NO: 18, a LCDR3 as set forth in SEQ ID NO: 44, a HCDR1 as set forth in SEQ ID NO: 57, a HCDR2 as set forth in SEQ ID NO: 70 and a HCDR3 as set forth in SEQ ID NO: 85.

9. The circular RNA of claim 8, wherein the antibody specifically binding to mesothelin comprises a light chain variable region and a heavy chain variable region selected from the following group:
(1) a light chain variable region as set forth in SEQ ID NO: 86 and a heavy chain variable region as set forth in SEQ ID NO: 101;
(2) a light chain variable region as set forth in SEQ ID NO: 87 and a heavy chain variable region as set forth in SEQ ID NO: 102;
(3) a light chain variable region as set forth in SEQ ID NO: 88 and a heavy chain variable region as set forth in SEQ ID NO: 103;
(4) a light chain variable region as set forth in SEQ ID NO: 89 and a heavy chain variable region as set forth in SEQ ID NO: 104;
(5) a light chain variable region as set forth in SEQ ID NO: 90 and a heavy chain variable region as set forth in SEQ ID NO: 105;
(6) a light chain variable region as set forth in SEQ ID NO: 91 and a heavy chain variable region as set forth in SEQ ID NO: 106;
(7) a light chain variable region as set forth in SEQ ID NO: 92 and a heavy chain variable region as set forth in SEQ ID NO: 107;
(8) a light chain variable region as set forth in SEQ ID NO: 93 and a heavy chain variable region as set forth in SEQ ID NO: 108;
(9) a light chain variable region as set forth in SEQ ID NO: 94 and a heavy chain variable region as set forth in SEQ ID NO: 109;
(10) a light chain variable region as set forth in SEQ ID NO: 95 and a heavy chain variable region as set forth in SEQ ID NO: 100;
(11) a light chain variable region as set forth in SEQ ID NO: 96 and a heavy chain variable region as set forth in SEQ ID NO: 111;
(12) a light chain variable region as set forth in SEQ ID NO: 97 and a heavy chain variable region as set forth in SEQ ID NO: 112;
(13) a light chain variable region as set forth in SEQ ID NO: 98 and a heavy chain variable region as set forth in SEQ ID NO: 113;
(14) a light chain variable region as set forth in SEQ ID NO: 99 and a heavy chain variable region as set forth in SEQ ID NO: 114; and
(15) a light chain variable region as set forth in SEQ ID NO: 100 and a heavy chain variable region as set forth in SEQ ID NO: 115.

10.-13. (canceled)

14. The circular RNA of claim 7, wherein the antibody specifically binding to BCMA includes a light chain variable region comprising LCDR1, LCDR2 and LCDR3 and a heavy chain variable region comprising HCDR1, HCDR2, and HCDR3, wherein LCDR1, LCDR2, LCDR3, HCDR1, HCDR2, and HCDR3 are selected from the following group:
(1) a LCDR1 as set forth in SEQ ID NO: 146, a LCDR2 as set forth in SEQ ID NO: 156, a LCDR3 as set forth in SEQ ID NO: 167, a HCDR1 as set forth in SEQ ID NO: 178, a HCDR2 as set forth in SEQ ID NO: 189 and a HCDR3 as set forth in SEQ ID NO: 201;
(2) a LCDR1 as set forth in SEQ ID NO: 147, a LCDR2 as set forth in SEQ ID NO: 157, a LCDR3 as set forth in SEQ ID NO: 168, a HCDR1 as set forth in SEQ ID NO: 179, a HCDR2 as set forth in SEQ ID NO: 190 and a HCDR3 as set forth in SEQ ID NO: 202;
(3) a LCDR1 as set forth in SEQ ID NO: 148, a LCDR2 as set forth in SEQ ID NO: 158, a LCDR3 as set forth in SEQ ID NO: 169, a HCDR1 as set forth in SEQ ID NO: 180, a HCDR2 as set forth in SEQ ID NO: 191 and a HCDR3 as set forth in SEQ ID NO: 203;
(4) a LCDR1 as set forth in SEQ ID NO: 149, a LCDR2 as set forth in SEQ ID NO: 159, a LCDR3 as set forth in SEQ ID NO: 169, a HCDR1 as set forth in SEQ ID NO: 181, a HCDR2 as set forth in SEQ ID NO: 192 and a HCDR3 as set forth in SEQ ID NO: 204;
(5) a LCDR1 as set forth in SEQ ID NO: 150, a LCDR2 as set forth in SEQ ID NO: 160, a LCDR3 as set forth in SEQ ID NO: 170, a HCDR1 as set forth in SEQ ID NO: 182, a HCDR2 as set forth in SEQ ID NO: 193 and a HCDR3 as set forth in SEQ ID NO: 205;
(6) a LCDR1 as set forth in SEQ ID NO: 151, a LCDR2 as set forth in SEQ ID NO: 161, a LCDR3 as set forth in SEQ ID NO: 171, a HCDR1 as set forth in SEQ ID NO: 183, a HCDR2 as set forth in SEQ ID NO: 194 and a HCDR3 as set forth in SEQ ID NO: 206;
(7) a LCDR1 as set forth in SEQ ID NO: 152, a LCDR2 as set forth in SEQ ID NO: 162, a LCDR3 as set forth in SEQ ID NO: 172, a HCDR1 as set forth in SEQ ID NO: 180, a HCDR2 as set forth in SEQ ID NO: 195 and a HCDR3 as set forth in SEQ ID NO: 207;
(8) a LCDR1 as set forth in SEQ ID NO: 153, a LCDR2 as set forth in SEQ ID NO: 163, a LCDR3 as set forth in SEQ ID NO: 173, a HCDR1 as set forth in SEQ ID NO: 184, a HCDR2 as set forth in SEQ ID NO: 196 and a HCDR3 as set forth in SEQ ID NO: 208;
(9) a LCDR1 as set forth in SEQ ID NO: 147, a LCDR2 as set forth in SEQ ID NO: 164, a LCDR3 as set forth in SEQ ID NO: 174, a HCDR1 as set forth in SEQ ID NO: 185, a HCDR2 as set forth in SEQ ID NO: 197 and a HCDR3 as set forth in SEQ ID NO: 209;
(10) a LCDR1 as set forth in SEQ ID NO: 147, a LCDR2 as set forth in SEQ ID NO: 165, a LCDR3 as set forth in SEQ ID NO: 175, a HCDR1 as set forth in SEQ ID NO: 186, a HCDR2 as set forth in SEQ ID NO: 198 and a HCDR3 as set forth in SEQ ID NO: 210;
(11) a LCDR1 as set forth in SEQ ID NO: 154, a LCDR2 as set forth in SEQ ID NO: 166, a LCDR3 as set forth in SEQ ID NO: 176, a HCDR1 as set forth in SEQ ID NO: 187, a HCDR2 as set forth in SEQ ID NO: 199 and a HCDR3 as set forth in SEQ ID NO: 211; and
(12) a LCDR1 as set forth in SEQ ID NO: 155, a LCDR2 as set forth in SEQ ID NO: 159, a LCDR3 as set forth in SEQ ID NO: 177, a HCDR1 as set forth in SEQ ID NO: 188, a HCDR2 as set forth in SEQ ID NO: 200 and a HCDR3 as set forth in SEQ ID NO: 212.

15. The circular RNA of claim 14, wherein the antibody specifically binding to BCMA comprises a light chain variable region and a heavy chain variable region selected from the following group:
(1) a light chain variable region as set forth in SEQ ID NO: 213 and a heavy chain variable region as set forth in SEQ ID NO: 225;
(2) a light chain variable region as set forth in SEQ ID NO: 214 and a heavy chain variable region as set forth in SEQ ID NO: 226;
(3) a light chain variable region as set forth in SEQ ID NO: 215 and a heavy chain variable region as set forth in SEQ ID NO: 227;
(4) a light chain variable region as set forth in SEQ ID NO: 216 and a heavy chain variable region as set forth in SEQ ID NO: 228;
(5) a light chain variable region as set forth in SEQ ID NO: 217 and a heavy chain variable region as set forth in SEQ ID NO: 229;
(6) a light chain variable region as set forth in SEQ ID NO: 218 and a heavy chain variable region as set forth in SEQ ID NO: 230;
(7) a light chain variable region as set forth in SEQ ID NO: 219 and a heavy chain variable region as set forth in SEQ ID NO: 231;
(8) a light chain variable region as set forth in SEQ ID NO: 220 and a heavy chain variable region as set forth in SEQ ID NO: 232;
(9) a light chain variable region as set forth in SEQ ID NO: 221 and a heavy chain variable region as set forth in SEQ ID NO: 233;
(10) a light chain variable region as set forth in SEQ ID NO: 222 and a heavy chain variable region as set forth in SEQ ID NO: 234;
(11) a light chain variable region as set forth in SEQ ID NO: 223 and a heavy chain variable region as set forth in SEQ ID NO: 235; and
(12) a light chain variable region as set forth in SEQ ID NO: 224 and a heavy chain variable region as set forth in SEQ ID NO: 236.

16.-31. (canceled)

32. The circular RNA of claim 7, wherein the CAR is a CAR targeting mesothelin, which comprises an amino acid sequence selected from SEQ ID Nos: 131-145.

33. The circular RNA of claim 1, wherein the protein comprises a fusion protein and the fusion protein comprises a first domain that activates an antigen-presenting cell (APC) and a second domain that activates an immune effector cell, wherein the first domain comprises CD40L or a receptor-binding fragment thereof, an anti-CD40 antibody or an antigen-binding fragment thereof, and the second domain comprises a CD28 cytoplasmic domain or an anti-CD28 antibody or an antigen-binding fragment thereof.

34. (canceled)

35. The circular RNA of claim 33, wherein the first domain is linked to the N-terminus or C-terminus of the second domain.

36. The circular RNA of claim 33, wherein
the first domain and the second domain are linked via a linker.

37. (canceled)

38. The circular RNA of claim 33, wherein the anti-CD40 antibody includes a light chain variable region comprising LCDR1, LCDR2 and LCDR3 and a heavy chain variable region comprising HCDR1, HCDR2, and HCDR3, wherein LCDR1, LCDR2, LCDR3, HCDR1, HCDR2, and HCDR3 are selected from the following group:
(1) a LCDR1 as set forth in SEQ ID NO: 828, a LCDR2 as set forth in SEQ ID NO: 834, a LCDR3 as set forth in SEQ ID NO: 840, a HCDR1 as set forth in SEQ ID NO: 846, a HCDR2 as set forth in SEQ ID NO: 852 and a HCDR3 as set forth in SEQ ID NO: 858;
(2) a LCDR1 as set forth in SEQ ID NO: 829, a LCDR2 as set forth in SEQ ID NO: 835, a LCDR3 as set forth in SEQ ID NO: 841, a HCDR1 as set forth in SEQ ID NO: 847, a HCDR2 as set forth in SEQ ID NO: 853 and a HCDR3 as set forth in SEQ ID NO: 859;
(3) a LCDR1 as set forth in SEQ ID NO: 830, a LCDR2 as set forth in SEQ ID NO: 836, a LCDR3 as set forth in SEQ ID NO: 842, a HCDR1 as set forth in SEQ ID NO: 848, a HCDR2 as set forth in SEQ ID NO: 854 and a HCDR3 as set forth in SEQ ID NO: 860;
(4) a LCDR1 as set forth in SEQ ID NO: 831, a LCDR2 as set forth in SEQ ID NO: 837, a LCDR3 as set forth in SEQ ID NO: 843, a HCDR1 as set forth in SEQ ID NO: 849, a HCDR2 as set forth in SEQ ID NO: 855 and a HCDR3 as set forth in SEQ ID NO: 861;
(5) a LCDR1 as set forth in SEQ ID NO: 832, a LCDR2 as set forth in SEQ ID NO: 838, a LCDR3 as set forth in SEQ ID NO: 844, a HCDR1 as set forth in SEQ ID NO: 850, a HCDR2 as set forth in SEQ ID NO: 856 and a HCDR3 as set forth in SEQ ID NO: 862; and
(6) a LCDR1 as set forth in SEQ ID NO: 833, a LCDR2 as set forth in SEQ ID NO: 839, a LCDR3 as set forth in SEQ ID NO: 845, a HCDR1 as set forth in SEQ ID NO: 851, a HCDR2 as set forth in SEQ ID NO: 857 and a HCDR3 as set forth in SEQ ID NO: 863.

39. The circular RNA of claim 33, wherein the anti-CD40 antibody comprises a light chain variable region and a heavy chain variable region selected from the following group:
(1) a light chain variable region as set forth in SEQ ID NO: 864 and a heavy chain variable region as set forth in SEQ ID NO: 870;
(2) a light chain variable region as set forth in SEQ ID NO: 865 and a heavy chain variable region as set forth in SEQ ID NO: 97-4871;
(3) a light chain variable region as set forth in SEQ ID NO: 866 and a heavy chain variable region as set forth in SEQ ID NO: 872;
(4) a light chain variable region as set forth in SEQ ID NO: 867 and a heavy chain variable region as set forth in SEQ ID NO: 873;
(5) a light chain variable region as set forth in SEQ ID NO: 868 and a heavy chain variable region as set forth in SEQ ID NO: 874; and
(6) a light chain variable region as set forth in SEQ ID NO: 869 and a heavy chain variable region as set forth in SEQ ID NO: 875.

40.-41. (canceled)

42. A precursor RNA for producing the circular RNA of claim 1, the precursor RNA comprising a circularizing element, an internal ribosome entry site (IRES) element, a protein coding sequence and a poly A.

43.-49. (canceled)

50. A method of producing a circular RNA, the method comprising circularizing the precursor RNA of claim 42 to produce the circular RNA, and purifying the circular RNA through oligo dT-based capturing.

51.-54. (canceled)

55. A cell or a cell population comprising the circular RNA of claim 1.

56. A cell or a cell population comprising a first circular RNA and a second circular RNA, wherein the first circular RNA is a circular RNA of claim 5; and the second circular RNA is a circular RNA comprising, in the following order, an internal ribosome entry site (IRES) element, a sequence encoding a fusion protein, and a poly A, wherein the fusion protein comprises a first domain that activates an antigen-presenting cell (APC) and a second domain that activates an immune effector cell, wherein the first domain comprises CD40L or a receptor-binding fragment thereof, an anti-CD40 antibody or an antigen-binding fragment thereof, and the second domain comprises a CD28 cytoplasmic domain or an anti-CD28 antibody or an antigen-binding fragment thereof.

57.-63. (canceled)

64. A method of treating a cancer in a subject in need thereof, comprising administering to the subject a therapeutically effective amount of the cell or cell population of claim 55.

65. (canceled)

66. The method of claim 64, wherein the cancer expresses mesothelin, CD123, BCMA, CD19, HER2, IL13Ra2 or B7H3.

67. The method of claim 64, wherein the cancer is a solid tumor or a hematological cancer.

68. The method of claim 64 wherein the cancer is acute myeloid leukemia (AML), B-acute lymphoid leukemia (B-ALL), T-acute lymphoid leukemia (T-ALL), B cell precursor acute lymphoblastic leukemia (BCP-ALL) or blastic plasmacytoid dendritic cell neoplasm (BPDCN), non-Hodgkin's lymphoma, chronic lymphocytic leukemia, acute lymphocytic leukemia, human B-cell precursor leukemia, multiple myeloma or malignant lymphoma, mesothelioma, pancreatic cancer, ovarian cancer, lung cancer, breast cancer, stomach cancer, cervical cancer, uroepithelial cancer, esophageal cancer, bladder cancer, colorectal cancer, endometrial cancer, kidney cancer, head and neck cancer, sarcoma, glioblastoma, prostate cancer, thyroid cancer or glioma.

69.-75. (canceled)
